(19) United States
(12) Patent Application Publication
(10) Pub. No.: US 2011/0200611 A1
(43) Pub. Date: Aug. 18, 2011

(54) PLASMA KALLIKREIN BINDING PROTEINS

(75) Inventor: Daniel J. Sexton, Melrose, MA (US)

(73) Assignee: DYAX CORP., Cambridge, MA (US)

(21) Appl. No.: 12/985,914

(22) Filed: Jan. 6, 2011

Related U.S. Application Data
(60) Provisional application No. 61/292,614, filed on Jan. 6, 2010.

(51) Int. Cl. A61K 39/395; C07K 16/40; A61P 1/00; A61P 19/02; A61P 25/04; A61P 29/00; A61P 11/00; A61P 9/00

(52) U.S. Cl. 424/158.1; 530/389.3; 530/387.1

(57) ABSTRACT

Plasma kallikrein binding proteins and methods of using such proteins are described.

[0001] This application claims priority to U.S. Application Ser. No. 61/292,614, filed on Jan. 6, 2010. The disclosure of the prior application is considered part of (and is incorporated by reference in) the disclosure of this application.

### BACKGROUND

[0002] Plasma kallikrein is a serine protease. Prekallikrein is the precursor of plasma kallikrein.

### SUMMARY

[0003] Plasma kallikrein is a serine protease component of the contact system and a potential drug target for different inflammatory, cardiovascular, infectious (sepsis) and oncology diseases (Sainz I. M. et al., Thromb Haemost 98, 77-83, 2007). The contact system is activated by either factor XIIa upon exposure to foreign or negatively charged surfaces or on endothelial cell surfaces by prolylcarboxypeptidases (FIG. 1) (Sainz I. M. et al., Thromb Haemost 98, 77-83, 2007). Activation of the plasma kallikrein amplifies intrinsic coagulation via its feedback activation of factor XII and enhances inflammation via the production of the proinflammatory nonapeptide bradykinin. As the primary kininogenase in the circulation, plasma kallikrein is largely responsible for the generation of bradykinin in the vasculature. A genetic deficiency in the C1-inhibitor protein (C1-INH), the major natural inhibitor of plasma kallikrein, leads to hereditary angioedema (HAE). Patients with HAE suffer from acute attacks of painful edema often precipitated by unknown triggers (Zuraw B. L. et al., N Engl J Med 359, 1027-1036, 2008). Through the use of pharmacological agents or genetic studies in animal models, the plasma kallikrein-kinin system (plasma KKS) has been implicated in various diseases.

[0004] Plasma kallikrein binding proteins (e.g., antibodies, e.g., inhibitory antibodies) are useful therapeutic agents for a variety of diseases and conditions, e.g., diseases and conditions that involve plasma kallikrein activity, due to their high potency, specificity, and prolonged serum residency. High potency can translate to efficacy and a low drug dosage, and high specificity can reduce side effects due to the inhibition of related off target serine proteases. In general, small molecule serine proteases are not as specific as antibody inhibitors. Prolonged serum residency can permit infrequent dosing.

[0005] In some aspects, the disclosure features an isolated protein (e.g., antibody, e.g., human antibody) that binds to the active form of plasma kallikrein (e.g., human plasma kallikrein and/or mouse plasma kallikrein), and, e.g., does not bind preplasma kallikrein (e.g., human preplasma kallikrein and/or mouse preplasma kallikrein).

[0006] In some embodiments, the plasma kallikrein binding protein binds the same epitope or competes for binding with a kallikrein binding protein described herein. In some embodiments, the plasma kallikrein binding protein binds the same epitope or competes for binding with a protein (e.g., epi-Kal2) and/or a small molecule (e.g., AEBSF) described herein and does not bind pre-plasma kallikrein.

[0007] In some embodiments, the protein described herein is selected from the group consisting of M162-A04, M160-G12, M142-H08, X63-G06, X101-A01 (also referred to herein as DX-2922), X81-B01, X67-D03, X67-G04, X115-B07, X115-D05, X115-E09, X115-H06, X115-A03, X115-D01, X115-F02, X115-G04, M29-D09, M145-D11, M06-D09 and M35-G04.

[0008] In some embodiments, the plasma kallikrein binding protein competes with or binds the same epitope as X81-B01 and, e.g., does not bind pre-plasma kallikrein.

[0009] In some embodiments, the plasma kallikrein binding protein competes with or binds the same epitope as X67-D03 and, e.g., does not bind pre-plasma kallikrein.

[0010] In some embodiments, the plasma kallikrein binding protein competes with or binds to the same site as X101-A01 and, e.g., does not bind pre-plasma kallikrein.

[0011] In some embodiments, the plasma kallikrein binding protein competes with or binds to the same site as M162-A04 and, e.g., does not bind pre-plasma kallikrein.

[0012] In some embodiments, the plasma kallikrein binding protein competes with or binds to the same site as X63-G06 and, e.g., does not bind pre-plasma kallikrein.

[0013] In some embodiments, the plasma kallikrein binding protein does not bind prekallikrein (e.g., human prekallikrein and/or mouse prekallikrein), but binds to the active form of plasma kallikrein (e.g., human plasma kallikrein and/or mouse plasma kallikrein).

[0014] In certain embodiments, the protein binds at or near the active site of the catalytic domain of plasma kallikrein, or a fragment thereof, or binds an epitope that overlaps with the active site of plasma kallikrein and, e.g., does not bind pre-plasma kallikrein.

[0015] In some embodiments, the protein binds to one or more amino acids that form the catalytic triad of plasma kallikrein: His434, Asp483, and/or Ser578 (numbering based on the human sequence) and, e.g., does not bind pre-plasma kallikrein.

[0016] In some embodiments, the protein binds to one or more amino acids of: Ser479, Tyr563, and/or Asp585 (numbering based on the human sequence) and, e.g., does not bind pre-plasma kallikrein.

[0017] In some embodiments, the plasma kallikrein binding protein binds one or more amino acids of: Arg551, Gln553, Tyr555, Thr558, and/or Arg560 (numbering based on the human kallikrein sequence). In other embodiments, the plasma kallikrein binding protein binds two, three, four or five (i.e., all) amino acids of: Arg551, Gln553, Tyr555, Thr558, and/or Arg560 (numbering based on the human sequence) and, e.g., does not bind pre-plasma kallikrein.

[0018] In some embodiments, the plasma kallikrein binding protein binds one or more amino acids of: S478, N481, S525, and K526 (numbering based on the human kallikrein sequence). In other embodiments, the plasma kallikrein binding protein binds two, three or four (i.e., all) amino acids of: S478, N481, S525, and K526 (numbering based on the human kallikrein sequence).

[0019] In some embodiments, the plasma kallikrein binding protein decreases Factor XIIa and/or bradykinin production by greater than about 5%, about 10%, about 15%, about 20%, about 25%, about 30%, about 35%, about 40%, about 45%, about 50%, about 55%, about 60%, about 65%, about 70%, about 75%, about 80%, about 85%, about 90%, or about 95% as compared to a standard, e.g., the Factor XIIa and/or bradykinin production under the same conditions but in the absence of the protein.

[0020] In some embodiments, the plasma kallikrein binding protein has an apparent inhibition constant (K_{i,app}) of less than 1000, 500, 100, 10, 1, 0.5 or 0.2 nM.

[0021] In one embodiment, the HC and LC variable domain sequences are components of the same polypeptide chain.

[0022] In another embodiment, the HC and LC variable domain sequences are components of different polypeptide chains. For example, the plasma kallikrein binding protein is an IgG., e.g., IgG1, IgG2, IgG3, or IgG4. The plasma kallikrein binding protein can be a soluble Fab (sFab).

[0023] In some embodiments, the plasma kallikrein binding protein has a serum residence time of 1 week, 2 weeks, 3 weeks, 4 weeks, 5 weeks or more, in vivo, e.g., in humans. In one embodiment, the plasma kallikrein binding protein is an IgG, e.g., an IgG1, IgG2, IgG3 or IgG4, that has a serum residence time of 1 week, 2 weeks, 3 weeks, 4 weeks, 5 weeks or more in vivo, e.g., in humans.

[0024] In some embodiments, the plasma kallikrein binding protein is physically associated with a moiety that improves serum residence time, e.g., a moiety described herein.

[0025] In other embodiments, the plasma kallikrein binding protein includes a Fab2′, scFv, minibody, scFv::Fc fusion, Fab::HSA fusion, HSA::Fab fusion, Fab::HSA::Fab fusion, or other molecule that comprises the antigen combining site of one of the binding proteins herein. The VH and VL regions of these Fabs can be provided as IgG, Fab, Fab2, Fab2′, scFv, PEGylated Fab, PEGylated scFv, PEGylated Fab2, VH::CH1::HSA+LC, HSA::VH::CH1+LC, LC::HSA+VH::CH1, HSA::LC+VH::CH1, or other appropriate construction.

[0026] In one embodiment, the plasma kallikrein binding protein is a human or humanized antibody or is non-immunogenic in a human. For example, the protein includes one or more human antibody framework regions, e.g., all human framework regions.

[0027] In one embodiment, the plasma kallikrein binding protein includes a human Fc domain, or an Fc domain that is at least 95, 96, 97, 98, or 99% identical to a human Fc domain.

[0028] In one embodiment, the plasma kallikrein binding protein is a primate or primatized antibody or is non-immunogenic in a human. For example, the protein includes one or more primate antibody framework regions, e.g., all primate framework regions.

[0029] In one embodiment, the plasma kallikrein binding protein includes a primate Fc domain, or an Fc domain that is at least 95, 96, 97, 98, or 99% identical to a primate Fc domain. “Primate” includes humans (Homo sapiens), chimpanzees (Pan troglodytes and Pan paniscus (bonobos)), gorillas (Gorilla gorilla), gibons, monkeys, lemurs, aye-ayes (Daubentonia madagascariensis), and tarsiers.

[0030] In one embodiment, the plasma kallikrein binding protein includes human framework regions, or framework regions that are at least 95, 96, 97, 98, or 99% identical to human framework regions.

[0031] In certain embodiments, the plasma kallikrein binding protein includes no sequences from mice or rabbits (e.g., is not a murine or rabbit antibody).

[0032] In certain embodiments, the plasma kallikrein binding protein is capable of binding to a cell or tissue, e.g., that expresses plasma kallikrein.

[0033] In one embodiment, the plasma kallikrein binding protein is physically associated with a nanoparticle, and can be used to guide a nanoparticle to a cell or tissue expressing plasma kallikrein.

[0034] In some aspects, the disclosure features an isolated protein (e.g., antibody, e.g., human antibody) that binds the same epitope or competes for binding with a kallikrein binding protein described herein.

[0035] In some embodiments, the protein binds the same epitope or competes for binding with a protein (e.g., epi-Kal2) and/or a small molecule (e.g., AEBSF) described herein.

[0036] In some embodiments, the isolated protein comprises a heavy chain immunoglobulin variable domain sequence and a light chain immunoglobulin variable domain sequence, wherein:

[0037] the heavy chain immunoglobulin variable domain sequence comprises one, two, or three (e.g., three) CDR regions from the heavy chain variable domain of a protein described herein, and/or

[0038] the light chain immunoglobulin variable domain sequence comprises one, two, or three (e.g., three) CDR regions from the light chain variable domain of a protein described herein,

[0039] wherein the protein binds to plasma kallikrein.

[0040] In some embodiments, the heavy chain immunoglobulin variable domain sequence comprises one, two, or three (e.g., three) CDR regions from the heavy chain variable domain of M162-A04, M160-G12, M142-H08, X63-G06, X101-A01, X81-B01, X67-D03, X67-G04, X115-B07, X115-D05, X115-E09, X115-H06, X115-A03, X115-D01, X115-F02, X115-G04, M29-D09, M145-D11, M06-D09 and M35-G04.

[0041] the light chain immunoglobulin variable domain sequence comprises one, two, or three (e.g., three) CDR regions from the light chain variable domain of M162-A04, M160-G12, M142-H08, X63-G06, X101-A01, X81-B01, X67-D03, X67-G04, X115-B07, X115-D05, X115-E09, X115-H06, X115-A03, X115-D01, X115-F02, X115-G04, M29-D09, M145-D11, M06-D09 and M35-G04 (respectively).

[0042] In some embodiments, the protein inhibits plasma kallikrein (e.g., human plasma kallikrein and/or mouse plasma kallikrein).

[0043] In some embodiments, the one, two, or three (e.g., three) CDR regions from the heavy chain variable domain are from X81-B01 and/or the one, two, or three (e.g., three) CDR regions from the light chain variable domain are from X81-B01.

[0044] In some embodiments, the one, two, or three (e.g., three) CDR regions from the heavy chain variable domain are from X67-D03 and/or the one, two, or three (e.g., three) CDR regions from the light chain variable domain are from X67-D03.

[0045] In some embodiments, the one, two, or three (e.g., three) CDR regions from the heavy chain variable domain are from X63-G06 and/or the one, two, or three (e.g., three) CDR regions from the light chain variable domain are from X63-G06.

[0046] In some embodiments, the one, two, or three (e.g., three) CDR regions from the heavy chain variable domain are from M162-A04 and/or the one, two, or three (e.g., three) CDR regions from the light chain variable domain are from MJ162-A04.

[0047] In some embodiments, the heavy chain immunoglobulin variable domain sequence comprises the heavy chain variable domain of a protein described herein, and/or the light chain immunoglobulin variable domain sequence comprises the light chain variable domain of a protein described herein.

[0048] In some embodiments, the heavy chain immunoglobulin variable domain sequence comprises the heavy chain variable domain of M162-A04, M160-G12, M142-H08, X63-G06, X101-A01, X81-B01, X67-D03, X67-G04, X115-B07, X115-D05, X115-E09, X115-H06, X115-A03, X115-D01, X115-F02, X115-G04, M29-D09, M145-D11, M06-D09 and M35-G04, and/or the light chain immunoglobulin variable domain sequence comprises the light chain variable domain of M162-A04, M160-G12, M142-H08, X63-G06, X101-A01, X81-B01, X67-D03, X67-G04, X115-B07, X115-D05, X115-E09, X115-H06, X115-A03, X115-D01, X115-F02, X115-G04, M29-D09, M145-D11, M06-D09 and M35-G04 (respectively).

[0049] In some embodiments, the heavy chain immunoglobulin variable domain sequence comprises the heavy chain variable domain of X81-B01, and/or the light chain immunoglobulin variable domain sequence comprises the light chain variable domain of X81-B01.

[0050] In some embodiments, the heavy chain immunoglobulin variable domain sequence comprises the heavy chain variable domain of X67-D03, and/or the light chain immunoglobulin variable domain sequence comprises the light chain variable domain of X67-D03.

[0051] In some embodiments, the protein comprises the heavy chain of a protein described herein, and/or the light chain of a protein described herein.

[0052] In some embodiments, the protein comprises the heavy chain of M162-A04, M160-G12, M142-H08, X63-G06, X101-A01, X81-B01, X67-D03, X67-G04, X115-B07, X115-D05, X115-E09, X115-H06, X115-A03, X115-D01, X115-F02, X115-G04, M29-D09, M145-D11, M06-D09 and M35-G04.

[0053] and/or the light chain of M162-A04, M160-G12, M142-H08, X63-G06, X101-A01, X81-B01, X67-D03, X67-G04, X115-B07, X115-D05, X115-E09, X115-H06, X115-A03, X115-D01, X115-F02, X115-G04, M29-D09, M145-D11, M06-D09 and M35-G04 (respectively).

[0054] In some embodiments, the protein comprises the heavy chain of X81-B01, and/or the light chain of X81-B01.

[0055] In some embodiments, the protein comprises the heavy chain of X67-D03, and/or the light chain of X67-D03.

[0056] In some embodiments, the plasma kallikrein binding protein does not bind prekallikrein (e.g., human prekallikrein and/or mouse prekallikrein), but binds to the active form of plasma kallikrein (e.g., human plasma kallikrein and/or mouse plasma kallikrein).

[0057] In some embodiments, the plasma kallikrein binding protein decreases Factor XIIa and/or bradykinin production by greater than about 5%, about 10%, about 15%, about 20%, about 25%, about 30%, about 35%, about 40%, about 45%, about 50%, about 55%, about 60%, about 65%, about 70%, about 75%, about 80%, about 85%, about 90%, or about 95% as compared to a standard, e.g., the Factor XIIa and/or bradykinin production under the same conditions but in the absence of the protein.

[0058] In some embodiments, the protein includes one or more of the following characteristics: (a) a human CDR or human framework region; (b) the HC immunoglobulin variable domain sequence comprises one or more (e.g., 1, 2, or 3) CDRs that are at least 85, 88, 89, 90, 91, 92, 93, 94, 95, 96, 97, 98, 99, or 100% identical to a CDR of a HC variable domain described herein; (c) the LC immunoglobulin variable domain sequence comprises one or more (e.g., 1, 2, or 3) CDRs that are at least 85, 88, 89, 90, 91, 92, 93, 94, 95, 96, 97, 98, 99, or 100% identical to a CDR of a LC variable domain described herein; (d) the LC immunoglobulin variable domain sequence is at least 85, 88, 89, 90, 91, 92, 93, 94, 95, 96, 97, 98, 99, or 100% identical to a LC variable domain described herein (e.g., overall or in framework regions or CDRs); (e) the HC immunoglobulin variable domain sequence is at least 85, 88, 89, 90, 91, 92, 93, 94, 95, 96, 97, 98, 99, or 100% identical to a HC variable domain described herein (e.g., overall or in framework regions or CDRs); (f) the protein binds an epitope bound by a protein described herein, or competes for binding with a protein described herein; (g) a primate

[0059] CDR or primate framework region; (h) the HC immunoglobulin variable domain sequence comprises a CDR1 that differs by at least one amino acid but by no more than 2 or 3 amino acids from the CDR1 of a HC variable domain described herein; (i) the HC immunoglobulin variable domain sequence comprises a CDR2 that differs by at least one amino acid but by no more than 2, 3, 4, 5, 6, 7, or 8 amino acids from the CDR2 of a HC variable domain described herein; (j) the HC immunoglobulin variable domain sequence comprises a CDR3 that differs by at least one amino acid but by no more than 2, 3, 4, 5, or 6 amino acids from the CDR3 of a HC variable domain described herein; (k) the LC immunoglobulin variable domain sequence comprises a CDR1 that differs by at least one amino acid but by no more than 2, 3, 4, or 5 amino acids from the CDR1 of a LC variable domain described herein; (l) the LC immunoglobulin variable domain sequence comprises a CDR2 that differs by at least one amino acid but by no more than 2, 3, or 4 amino acids from the CDR2 of a LC variable domain described herein; (m) the LC immunoglobulin variable domain sequence comprises a CDR3 that differs by at least one amino acid but by no more than 2, 3, 4, or 5 amino acids from the CDR3 of a LC variable domain described herein; (n) the LC immunoglobulin variable domain sequence differs by at least one amino acid but by no more than 2, 3, 4, 5, 6, 7, 8, 9, or 10 amino acids from a LC variable domain described herein (e.g., overall or in framework regions or CDRs); and (o) the HC immunoglobulin variable domain sequence differs by at least one amino acid but by no more than 2, 3, 4, 5, 6, 7, 8, 9, or 10 amino acids from a HC variable domain described herein (e.g., overall or in framework regions or CDRs).

[0060] In some embodiments, the protein has an apparent inhibition constant (K_{i,app}) of less than 1000, 500, 100, 10, 1, 0.5 or 0.2 nM.

[0061] In some embodiments, the antibody does not bind prekallikrein (e.g., human prekallikrein and/or mouse prekallikrein), but binds to the active form of plasma kallikrein (e.g., human plasma kallikrein and/or mouse plasma kallikrein).

[0062] In a preferred embodiment, the protein is an antibody (e.g., a human antibody) having the light and heavy chains of antibodies selected from the group consisting of M162-A04, M160-G12, M142-H08, X63-G06, X101-A01, X81-B01, X67-D03, X67-G04, X115-B07, X115-D05, X115-E09, X115-H06, X115-A03, X115-D01, X115-F02, X115-G04, M29-D09, M145-D11, M06-D09 and M35-G04.

[0063] In a preferred embodiment, the protein is an antibody (e.g., a human antibody) having the heavy chain of an antibody selected from the group consisting of: M162-A04, M160-G12, M142-H08, X63-G06, X101-A01, X81-B01, X67-D03, X67-G04, X115-B07, X115-D05, X115-E09, X115-H06, X115-A03, X115-D01, X115-F02, X115-G04, M29-D09, M145-D11, M06-D09 and M35-G04.

[0064] In a preferred embodiment, the protein is an antibody (e.g., a human antibody) having the light chain of an antibody selected from the group consisting of: M162-A04, M160-G12, M142-H08, X63-G06, X101-A01, X81-B01, X67-D03, X67-G04, X115-B07, X115-D05, X115-E09, X115-H06, X115-A03, X115-D01, X115-F02, X115-G04, M29-D09, M145-D11, M06-D09 and M35-G04.

[0065] In a preferred embodiment, the protein is an antibody (e.g., a human antibody) having light and heavy antibody variable regions of an antibody selected from the group consisting of M162-A04, M160-G12, M142-H08, X63-G06, X101-A01, X81-B01, X67-D03, X67-G04, X115-B07, X115-D05, X115-E09, X115-H06, X115-A03, X115-D01, X115-F02, X115-G04, M29-D09, M145-D11, M06-D09 and M35-G04.

[0066] In a preferred embodiment, the protein is an antibody (e.g., a human antibody) having a heavy chain antibody variable region of an antibody selected from the group consisting of: M162-A04, M160-G12, M142-H08, X63-G06, X101-A01, X81-B01, X67-D03, X67-G04, X115-B07, X115-D05, X115-E09, X115-H06, X115-A03, X115-D01, X115-F02, X115-G04, M29-D09, M145-D11, M06-D09 and M35-G04.

[0067] In a preferred embodiment, the protein is an antibody (e.g., a human antibody) having a light chain antibody variable region of an antibody selected from the group consisting of: M162-A04, M160-G12, M142-H08, X63-G06, X101-A01, X81-B01, X67-D03, X67-G04, X115-B07, X115-D05, X115-E09, X115-H06, X115-A03, X115-D01, X115-F02, X115-G04, M29-D09, M145-D11, M06-D09 and M35-G04.

[0068] In a preferred embodiment, the protein is an antibody (e.g., a human antibody) having one or more (e.g., 1, 2, or 3) heavy chain CDRs selected from the corresponding CDRs of the group of heavy chains consisting of M162-A04, M160-G12, M142-H08, X63-G06, X101-A01, X81-B01, X67-D03, X67-G04, X115-B07, X115-D05, X115-E09, X115-H06, X115-A03, X115-D01, X115-F02, X115-G04, M29-D09, M145-D11, M06-D09 and M35-G04.

[0069] In a preferred embodiment, the protein is an antibody (e.g., a human antibody) having one or more (e.g., 1, 2, or 3) light chain CDRs selected from the corresponding CDRs of the group of light chains consisting of M162-A04, M160-G12, M142-H08, X63-G06, X101-A01, X81-B01, X67-D03, X67-G04, X115-B07, X115-D05, X115-E09, X115-H06, X115-A03, X115-D01, X115-F02, X115-G04, M29-D09, M145-D11, M06-D09 and M35-G04.

[0070] In a preferred embodiment, the protein is an antibody (e.g., a human antibody) having one or more (e.g., 1, 2, or 3) heavy chain CDRs selected from the corresponding CDRs of the group of heavy chains consisting of M162-A04, M160-G12, M142-H08, X63-G06, X101-A01, X81-B01, X67-D03, X67-G04, X115-B07, X115-D05, X115-E09, X115-H06, X115-A03, X115-D01, X115-F02, X115-G04, M29-D09, M145-D11, M06-D09 and M35-G04.

[0071] and one or more (e.g., 1, 2, or 3) light chain CDRs selected from the corresponding CDRs of the group of light chains consisting of M162-A04, M160-G12, M142-H08, X63-G06, X101-A01, X81-B01, X67-D03, X67-G04, X115-B07, X115-D05, X115-E09, X115-H06, X115-A03, X115-D01, X115-F02, X115-G04, M29-D09, M145-D11, M06-D09 and M35-G04 (respectively).

[0072] In a preferred embodiment, the protein is an antibody (e.g., a human antibody) having the light and heavy chains of X81-B01.

[0073] In a preferred embodiment, the protein is an antibody (e.g., a human antibody) having the heavy chain of X81-B01.

[0074] In a preferred embodiment, the protein is an antibody (e.g., a human antibody) having the light chain of X81-B01.

[0075] In a preferred embodiment, the protein is an antibody (e.g., a human antibody) having light and heavy antibody variable regions of an antibody selected from X81-B01.

[0076] In a preferred embodiment, the protein is an antibody (e.g., a human antibody) having a heavy chain antibody variable region of X81-B01.

[0077] In a preferred embodiment, the protein is an antibody (e.g., a human antibody) having a light chain antibody variable region of X81-B01.

[0078] In a preferred embodiment, the protein is an antibody (e.g., a human antibody) having one or more (e.g., 1, 2, or 3) heavy chain CDRs from the corresponding CDRs of the heavy chain of X81-B01.

[0079] In a preferred embodiment, the protein is an antibody (e.g., a human antibody) having one or more (e.g., 1, 2, or 3) light chain CDRs from the corresponding CDRs of the light chain of X81-B01.

[0080] In a preferred embodiment, the protein is an antibody (e.g., a human antibody) having one or more (e.g., 1, 2, or 3) heavy chain CDRs from the heavy chain of X81-B01 and one or more (e.g., 1, 2, or 3) light chain CDRs from the corresponding CDRs of the light chain of X81-B01.

[0081] In a preferred embodiment, the protein is an antibody (e.g., a human antibody) having the light and heavy chains of X67-D03.

[0082] In a preferred embodiment, the protein is an antibody (e.g., a human antibody) having the heavy chain of X67-D03.

[0083] In a preferred embodiment, the protein is an antibody (e.g., a human antibody) having the light chain of X67-D03.

[0084] In a preferred embodiment, the protein is an antibody (e.g., a human antibody) having light and heavy antibody variable regions of an antibody selected from X67-D03.

[0085] In a preferred embodiment, the protein is an antibody (e.g., a human antibody) having a heavy chain antibody variable region of X67-D03.

[0086] In a preferred embodiment, the protein is an antibody (e.g., a human antibody) having a light chain antibody variable region of X67-D03.

[0087] In a preferred embodiment, the protein is an antibody (e.g., a human antibody) having one or more (e.g., 1, 2, or 3) heavy chain CDRs from the corresponding CDRs of the heavy chain of X67-D03.

[0088] In a preferred embodiment, the protein is an antibody (e.g., a human antibody) having one or more (e.g., 1, 2, or 3) light chain CDRs from the corresponding CDRs of the light chain of X67-D03.

[0089] In a preferred embodiment, the protein is an antibody (e.g., a human antibody) having one or more (e.g., 1, 2, or 3) heavy chain CDRs from the heavy chain of X67-D03 and one or more (e.g., 1, 2, or 3) light chain CDRs from the corresponding CDRs of the light chain of X67-D03.

[0090] In one embodiment, the HC and LC variable domain sequences are components of the same polypeptide chain.

[0091] In some embodiments, the plasma kallikrein binding protein has a serum residence time of 1 week, 2 weeks, 3 weeks, 4 weeks, 5 weeks or more, in vivo, e.g., in humans. In one embodiment, the plasma kallikrein binding protein is an IgG, e.g., an IgG1, IgG2, IgG3 or IgG4, that has a serum residence time of 1 week, 2 weeks, 3 weeks, 4 weeks, 5 weeks or more in vivo, e.g., in humans.

[0092] In some embodiments, the plasma kallikrein binding protein is physically associated with a moiety that improves serum residence time, e.g., a moiety described herein.

[0093] In another embodiment, the HC and LC variable domain sequences are components of different polypeptide chains. For example, the protein is an IgG, e.g., IgG1, IgG2, IgG3, or IgG4. The protein can be a soluble Fab (sFab).

[0094] In other embodiments, the protein includes a Fab2′, scFv, minibody, scFv::Fc fusion, Fab::HSA fusion, HSA::Fab fusion, Fab::HSA::Fab fusion, or other molecule that comprises the antigen combining site of one of the binding proteins herein. The VH and VL regions of these Fabs can be provided as IgG, Fab, Fab2, Fab2′, scFv, PEGylated Fab, PEGylated scFv, PEGylated Fab2, VH::CH1::HSA+LC, HSA::VH::CH1+LC, LC::HSA+VH::CH1, HSA::LC+VH::CH1, or other appropriate construction.

[0095] In one embodiment, the protein is a human or humanized antibody or is non-immunogenic in a human. For example, the protein includes one or more human antibody framework regions, e.g., all human framework regions.

[0096] In one embodiment, the protein includes a human Fc domain, or an Fc domain that is at least 95, 96, 97, 98, or 99% identical to a human Fc domain.

[0097] In one embodiment, the protein is a primate or primatized antibody or is non-immunogenic in a human. For example, the protein includes one or more primate antibody framework regions, e.g., all primate framework regions.

[0098] In one embodiment, the protein includes a primate Fc domain, or an Fc domain that is at least 95, 96, 97, 98, or 99% identical to a primate Fc domain. “Primate” includes humans (Homo sapiens), chimpanzees (Pan troglodytes and Pan paniscus (bonobos)), gorillas (Gorilla gorilla), gibons, monkeys, lemurs, aye-ayes (Daubentonia madagascariensis), and tarsiers.

[0099] In one embodiment, the protein includes human framework regions, or framework regions that are at least 95, 96, 97, 98, or 99% identical to human framework regions.

[0100] In certain embodiments, the protein includes no sequences from mice or rabbits (e.g., is not a murine or rabbit antibody).

[0101] In certain embodiments, the protein is capable of binding to a cell or tissue, e.g., that expresses plasma kallikrein.

[0102] In one embodiment, protein is physically associated with a nanoparticle, and can be used to guide a nanoparticle to a cell or tissue expressing plasma kallikrein.

[0103] In some aspects, the disclosure features a pharmaceutical composition comprising a kallikrein binding protein described herein, e.g., including a pharmaceutically acceptable carrier. In some embodiments, the composition can be at least 10, 20, 30, 50, 75, 85, 90, 95, 98, 99, or 99.9% free of other protein species. In one embodiment, the pharmaceutical composition can be at least 10, 20, 30, 50, 75, 85, 90, 95, 98, 99, or 99.9% free of fragments of the binding protein that do not binding plasma kallikrein (e.g., human plasma kallikrein) or bind plasma kallikrein (e.g., human plasma kallikrein with a Ki, app of 5000 nM or greater.

[0104] In some aspects, the disclosure features a method of treating or preventing a plasma kallikrein associated disorder in a subject, the method comprising:

[0105] administering an isolated protein (e.g., antibody, e.g., human antibody) that binds plasma kallikrein (e.g., human plasma kallikrein and/or mouse plasma kallikrein) and, e.g., does not bind prekallikrein (e.g., human prekallikrein and/or mouse prekallikrein) to the subject,

[0106] In some embodiments, the protein binds the same epitope or competes for binding with a protein (e.g., epi-Kal2) and/or a small molecule (e.g., AEBSF) described herein.

[0107] In some embodiments, the protein binds the same epitope or competes for binding with a kallikrein binding protein described herein.

[0108] In some embodiments, the plasma kallikrein associated disorder is selected from the group consisting of rheumatoid arthritis, gout, intestinal bowel disease, oral mucositis, neuropathic pain, inflammatory pain, spinal stenosis-degenerative spine disease, arterial or venous thrombosis, post operative ileus, aortic aneurysm, osteoarthritis, vasculitis, edema, hereditary angioedema, cerebral edema, pulmonary embolism, stroke, clotting on ventricular assistance devices or stents, head trauma or peri-tumor brain edema, sepsis, acute middle cerebral artery (MCA) ischemic event (stroke), restenosis (e.g., after angioplasty), systemic lupus erythematosis nephritis, and burn injury. In some embodiments, the plasma kallikrein binding protein reduces abberent clotting associated with the contact activation system (i.e., intrinsic activation system) by at least 10% as measured by e.g., an APTT clotting assay. In other embodiments, the plasma kallikrein binding protein reduces abberent clotting associated with the contact activation system by at least 20%, at least 30%, at least 40%, at least 50%, at least 60%, at least 70%, at least 80%, at least 90%, at least 95%, at least 99%, or even 100% (i.e., no detectable abberent clotting).

[0109] In some embodiments, the plasma kallikrein binding protein is administered in combination with another treatment for the disorder.

[0110] In some embodiments, the protein described herein is selected from the group consisting of M162-A04, M160-G12, M142-H08, X63-G06, X101-A01, X81-B01, X67-D03, X67-G04, X115-B07, X115-D05, X115-E09, X115-H06, X115-A03, X115-D01, X115-F02, X115-G04, M29-D09, M145-D11, M06-D09 and M35-G04.

[0111] In some embodiments, the plasma kallikrein binding protein competes with or binds the same epitope as X81-B01.

[0112] In some embodiments, the plasma kallikrein binding protein competes with or binds the same epitope as X67-D03.

[0113] In some embodiments, the plasma kallikrein binding protein does not bind prekallikrein (e.g., human prekallikrein and/or mouse prekallikrein), but binds to the active form of plasma kallikrein (e.g., human plasma kallikrein and/or mouse plasma kallikrein).

[0114] In certain embodiments, the protein binds at or near the active site of the catalytic domain of plasma kallikrein, or a fragment thereof, or binds an epitope that overlaps with the active site of plasma kallikrein.

[0115] In some embodiments, the protein binds to one or more amino acids that form the catalytic triad of plasma kallikrein: His434, Asp483, and/or Ser578 (numbering based on the human sequence).

[0116] In some embodiments, the protein binds to one or more amino acids of Ser479, Tyr563, and/or Asp585 (numbering based on the human sequence).

[0117] In other embodiments, the protein binds to one or more amino acids of Arg551, Gln553, Tyr555, Thr558, and/or Arg560 (numbering based on the human sequence). In some embodiments, the plasma kallikrein binding protein binds one or more amino acids of: S478, N481, S525, and K526 (numbering based on the human kallikrein sequence).

[0118] In some embodiments, the plasma kallikrein binding protein decreases Factor XIIa and/or bradykinin production by greater than about 5%, about 10%, about 15%, about 20%, about 25%, about 30%, about 35%, about 40%, about 45%, about 50%, about 55%, about 60%, about 65%, about 70%, about 75%, about 80%, about 85%, about 90%, or about 95% as compared to a standard, e.g., the Factor XIIa and/or bradykinin production under the same conditions but in the absence of the protein.

[0119] In some embodiments, the plasma kallikrein binding protein has an apparent inhibition constant (K_{i,app}) of less than 1000, 500, 100, 10, 5, 1, 0.5, or 0.2 nM.

[0120] In one embodiment, the HC and LC variable domain sequences are components of the same polypeptide chain.

[0121] In some embodiments, the plasma kallikrein binding protein has a serum residence time of 1 week, 2 weeks, 3 weeks, 4 weeks, 5 weeks or more, in vivo, e.g., in humans. In one embodiment, the plasma kallikrein binding protein is an IgG, e.g., an IgG1, IgG2, IgG3 or IgG4, that has a serum residence time of 1 week, 2 weeks, 3 weeks, 4 weeks, 5 weeks or more in vivo, e.g., in humans.

[0122] In some embodiments, the plasma kallikrein binding protein is physically associated with a moiety that improves serum residence time, e.g., a moiety described herein.

[0123] In another embodiment, the HC and LC variable domain sequences are components of different polypeptide chains. For example, the plasma kallikrein binding protein is an IgG, e.g., IgG1, IgG2, IgG3, or IgG4. The plasma kallikrein binding protein can be a soluble Fab (sFab).

[0124] In other implementations the plasma kallikrein binding protein includes a Fab2′, scFv, minibody, scFv::Fc fusion, Fab::HSA fusion, HSA::Fab fusion, Fab::HSA::Fab fusion, or other molecule that comprises the antigen combining site of one of the binding proteins herein. The VH and VL regions of these Fabs can be provided as IgG, Fab, Fab2, Fab2′, scFv, PEGylated Fab, PEGylated scFv, PEGylated Fab2, VH::CH1::HSA+LC, HSA::VH::CH1+LC, LC::HSA+VH::CH1, HSA::LC+VH::CH1, or other appropriate construction.

[0125] In one embodiment, the plasma kallikrein binding protein is a human or humanized antibody or is non-immunogenic in a human. For example, the protein includes one or more human antibody framework regions, e.g., all human framework regions.

[0126] In one embodiment, the plasma kallikrein binding protein includes a human Fc domain, or an Fc domain that is at least 95, 96, 97, 98, or 99% identical to a human Fc domain.

[0127] In one embodiment, the plasma kallikrein binding protein is a primate or primatized antibody or is non-immunogenic in a human. For example, the protein includes one or more primate antibody framework regions, e.g., all primate framework regions.

[0128] In one embodiment, the plasma kallikrein binding protein includes a primate Fc domain, or an Fc domain that is at least 95, 96, 97, 98, or 99% identical to a primate Fc domain. “Primate” includes humans (Homo sapiens), chimpanzees (Pan troglodytes and Pan paniscus (bonobos)), gorillas (Gorilla gorilla), gibons, monkeys, lemurs, aye-ayes (Daubentonia madagascariensis), and tarsiers.

[0129] In one embodiment, the plasma kallikrein binding protein includes human framework regions, or framework regions that are at least 95, 96, 97, 98, or 99% identical to human framework regions.

[0130] In certain embodiments, the plasma kallikrein binding protein includes no sequences from mice or rabbits (e.g., is not a murine or rabbit antibody).

[0131] In certain embodiments, the plasma kallikrein binding protein is capable of binding to a cell or tissue, e.g., that expresses plasma kallikrein.

[0132] In one embodiment, the plasma kallikrein binding protein is physically associated with a nanoparticle, and can be used to guide a nanoparticle to a cell or tissue expressing plasma kallikrein.

[0133] A method of treating or preventing a plasma kallikrein associated disorder in a subject, the method comprising:

[0134] administering an isolated protein (e.g., antibody, e.g., human antibody) comprising a heavy chain immunoglobulin variable domain sequence and a light chain immunoglobulin variable domain sequence to the subject, wherein:

[0135] the heavy chain immunoglobulin variable domain sequence comprises one, two, or three (e.g., three) CDR regions from the heavy chain variable domain of a protein described herein, and/or

[0136] the light chain immunoglobulin variable domain sequence comprises one, two, or three (e.g., three) CDR regions from the light chain variable domain of a protein described herein,

[0137] wherein the protein binds to plasma kallikrein (e.g., human plasma kallikrein and/or mouse plasma kallikrein).

[0138] In some embodiments, the plasma kallikrein associated disorder is selected from the group consisting of rheumatoid arthritis, gout, intestinal bowel disease, oral mucositis, neuropathic pain, inflammatory pain, spinal stenosis-degenerative spine disease, arterial or venous thrombosis, post operative ileus, aortic aneurysm, osteoarthritis, vasculitis, edema, hereditary angioedema, cerebral edema, pulmonary embolism, stroke, clotting of ventrical assistance devices or stents, head trauma or peri-tumor brain edema, sepsis, acute middle cerebral artery (MCA) ischemic event (stroke), restenosis (e.g., after angioplasty), systemic lupus erythematosis nephritis, and burn injury. In some embodiments, the plasma kallikrein binding protein reduces abberent clotting associated with the contact activation system (i.e., intrinsic activation system) by at least 10% as measured by e.g., an APTT clotting assay (e.g., by at least 20%, at least 30%, at least 40%, at least 50%, at least 60%, at least 70%, at least 80%, at least 90%, at least 95%, at least 99%, or even 100% (i.e., no detectable abberent clotting)).

[0139] In some embodiments, the protein is administered in combination with another treatment for the disorder.

[0140] In some embodiments, the protein is administered in combination with a second agent selected from the group consisting of ecallantide, a C1 esterase inhibitor, aprotinin, a bradykinin B2 receptor inhibitor (e.g., icatibant).

[0141] In some embodiments, the heavy chain immunoglobulin variable domain sequence comprises one, two, or three (e.g., three) CDR regions from the heavy chain variable domain of M162-A04, M160-G12, M142-H08, X63-G06, X101-A01, X81-B01, X67-D03, X67-G04, X115-B07, X115-D05, X115-E09, X115-H06, X115-A03, X115-D01, X115-F02, X115-G04, M29-D09, M145-D11, M06-D09 and M35-G04, and/or

[0142] the light chain immunoglobulin variable domain sequence comprises one, two, or three (e.g., three) CDR regions from the light chain variable domain of M162-A04, M160-G12, M142-H08, X63-G06, X101-A01, X81-B01, X67-D03, X67-G04, X115-B07, X115-D05, X115-E09, X115-H06, X115-A03, X115-D01, X115-F02, X115-G04, M29-D09, M145-D11, M06-D09 and M35-G04 (respectively).

[0143] In some embodiments, the protein inhibits plasma kallikrein.

[0144] In some embodiments, the one, two, or three (e.g., three) CDR regions from the heavy chain variable domain are from X81-B01 and/or the one, two, or three (e.g., three) CDR regions from the light chain variable domain are from X81-B01.

[0145] In some embodiments, the one, two, or three (e.g., three) CDR regions from the heavy chain variable domain are from X67-D03 and/or the one, two, or three (e.g., three) CDR regions from the light chain variable domain are from X67-D03.

[0146] In some embodiments, the heavy chain immunoglobulin variable domain sequence comprises the heavy chain variable domain of a protein described herein, and/or the light chain immunoglobulin variable domain sequence comprises the light chain variable domain of a protein described herein.

[0147] In some embodiments, the heavy chain immunoglobulin variable domain sequence comprises the heavy chain variable domain of M162-A04, M160-G12, M142-H08×63-G06, X101-A01, X81-B01, X67-D03, X67-G04, X115-B07, X115-D05, X115-E09, X115-H06, X115-A03, X115-D01, X115-F02, X115-G04, M29-D09, M145-D11, M06-D09 and M35-G04, and/or the light chain immunoglobulin variable domain sequence comprises the light chain variable domain of M162-A04, M160-G12, M142-H08, X63-G06, X101-A01, X81-B01, X67-D03, X67-G04, X115-B07, X115-D05, X115-E09, X115-H06, X115-A03, X115-D01, X115-F02, X115-G04, M29-D09, M145-D11, M06-D09 and M35-G04.

[0148] In some embodiments, the heavy chain immunoglobulin variable domain sequence comprises the heavy chain variable domain of X81-B01, and/or the light chain immunoglobulin variable domain sequence comprises the light chain variable domain of X81-B01.

[0149] In some embodiments, the heavy chain immunoglobulin variable domain sequence comprises the heavy chain variable domain of X67-D03, and/or the light chain immunoglobulin variable domain sequence comprises the light chain variable domain of X67-D03.

[0150] In some embodiments, the protein comprises the heavy chain of a protein described herein, and/or the light chain of a protein described herein.

[0151] In some embodiments, the protein comprises the heavy chain of M162-A04, M160-G12, M142-H08, X63-G06, X101-A01, X81-B01, X67-D03, X67-G04, X115-B07, X115-D05, X115-E09, X115-H06, X115-A03, X115-D01, X115-F02, X115-G04, M29-D09, M145-D11, M06-D09 and M35-G04, and/or the light chain of M162-A04, M160-G12, M142-H08, X63-G06, X101-A01, X81-B01, X67-D03, X67-G04, X115-B07, X115-D05, X115-E09, X115-H06, X115-A03, X115-D01, X115-F02, X115-G04, M29-D09, M145-D11, M06-D09 and M35-G04 (respectively).

[0152] In some embodiments, the protein comprises the heavy chain of X81-B01, and/or the light chain of X81-B01.

[0153] In some embodiments, the protein comprises the heavy chain of X67-D03, and/or the light chain of X67-D03.

[0154] In some embodiments, the plasma kallikrein binding protein does not bind prekallikrein (e.g., human prekallikrein and/or murine prekallikrein), but binds to the active form of plasma kallikrein (e.g., human plasma kallikrein and/or murine plasma kallikrein).

[0155] In some embodiments, the plasma kallikrein binding protein decreases Factor XIIa and/or bradykinin production by greater than about 5%, about 10%, about 15%, about 20%, about 25%, about 30%, about 35%, about 40%, about 45%, about 50%, about 55%, about 60%, about 65%, about 70%, about 75%, about 80%, about 85%, about 90%, or about 95% as compared to a standard, e.g., the Factor XIIa and/or bradykinin production under the same conditions but in the absence of the protein.

[0156] In some embodiments, the protein includes one or more of the following characteristics: (a) a human CDR or human framework region; (b) the HC immunoglobulin variable domain sequence comprises one or more (e.g., 1, 2, or 3) CDRs that are at least 85, 88, 89, 90, 91, 92, 93, 94, 95, 96, 97, 98, 99, or 100% identical to a CDR of a HC variable domain described herein; (c) the LC immunoglobulin variable domain sequence comprises one or more (e.g., 1, 2, or 3) CDRs that are at least 85, 88, 89, 90, 91, 92, 93, 94, 95, 96, 97, 98, 99, or 100% identical to a CDR of a LC variable domain described herein; (d) the LC immunoglobulin variable domain sequence is at least 85, 88, 89, 90, 91, 92, 93, 94, 95, 96, 97, 98, 99, or 100% identical to a LC variable domain described herein (e.g., overall or in framework regions or CDRs); (e) the HC immunoglobulin variable domain sequence is at least 85, 88, 89, 90, 91, 92, 93, 94, 95, 96, 97, 98, 99, or 100% identical to a HC variable domain described herein (e.g., overall or in framework regions or CDRs); (f) the protein binds an epitope bound by a protein described herein, or competes for binding with a protein described herein; and (g) a primate CDR or primate framework region.

[0157] In some embodiments, the protein has an apparent inhibition constant (K_{i,app}) of less than 1000, 500, 100, 10, 5, 1, 0.5 or 0.2 nM.

[0158] In some embodiments, the antibody does not bind prekallikrein (e.g., human prekallikrein), but binds to the active form of plasma kallikrein (e.g., human plasma kallikrein).

[0159] In a preferred embodiment, the protein is an antibody (e.g., a human antibody) having the light and heavy chains of antibodies selected from the group consisting of M162-A04, M160-G12, M142-H08, X63-G06, X101-A01, X81-B01, X67-D03, X67-G04, X115-B07, X115-D05, X115-E09, X115-H06, X115-A03, X115-D01, X115-F02, X115-G04, M29-D09, M145-D11, M06-D09 and M35-G04.

[0160] In a preferred embodiment, the protein is an antibody (e.g., a human antibody) having the heavy chain of an antibody selected from the group consisting of: M162-A04, M160-G12, M142-H08, X63-G06, X101-A01, X81-B01, X67-D03, X67-G04, X115-B07, X115-D05, X115-E09, X115-H06, X115-A03, X115-D01, X115-F02, X115-G04, M29-D09, M145-D11, M06-D09 and M35-G04.

[0161] In a preferred embodiment, the protein is an antibody (e.g., a human antibody) having the light chain of an antibody selected from the group consisting of: M162-A04, M160-G12, M142-H08, X63-G06, X101-A01, X81-B01, X67-D03, X67-G04, X115-B07, X115-D05, X115-E09, X115-H06, X115-A03, X115-D01, X115-F02, X115-G04, M29-D09, M145-D11, M06-D09 and M35-G04.

[0162] In a preferred embodiment, the protein is an antibody (e.g., a human antibody) having light and heavy antibody variable regions of an antibody selected from the group consisting of M162-A04, M160-G12, M142-H08, X63-G06, X101-A01, X81-B01, X67-D03, X67-G04, X115-B07, X115-D05, X115-E09, X115-H06, X115-A03, X115-D01, X115-F02, X115-G04, M29-D09, M145-D11, M06-D09 and M35-G04.

[0163] In a preferred embodiment, the protein is an antibody (e.g., a human antibody) having a heavy chain antibody variable region of an antibody selected from the group consisting of: M162-A04, M160-G12, M142-H08, X63-G06, X101-A01, X81-B01, X67-D03, X67-G04, X115-B07, X115-D05, X115-E09, X115-H06, X115-A03, X115-D01, X115-F02, X115-G04, M29-D09, M145-D11, M06-D09 and M35-G04.

[0164] In a preferred embodiment, the protein is an antibody (e.g., a human antibody) having a light chain antibody variable region of an antibody selected from the group consisting of: M162-A04, M160-G12, M142-H08, X63-G06, X101-A01, X81-B01, X67-D03, X67-G04, X115-B07, X115-D05, X115-E09, X115-H06, X115-A03, X115-D01, X115-F02, X115-G04, M29-D09, M145-D11, M06-D09 and M35-G04.

[0165] In a preferred embodiment, the protein is an antibody (e.g., a human antibody) having one or more (e.g., 1, 2, or 3) heavy chain CDRs selected from the corresponding CDRs of the group of heavy chains consisting of M162-A04, M160-G12, M142-H08, X63-G06, X101-A01, X81-B01, X67-D03, X67-G04, X115-B07, X115-D05, X115-E09, X115-H06, X115-A03, X115-D01, X115-F02, X115-G04, M29-D09, M145-D11, M06-D09 and M35-G04.

[0166] In a preferred embodiment, the protein is an antibody (e.g., a human antibody) having one or more (e.g., 1, 2, or 3) light chain CDRs selected from the corresponding CDRs of the group of light chains consisting of M162-A04, M160-G12, M142-H08, X63-G06, X101-A01, X81-B01, X67-D03, X67-G04, X115-B07, X115-D05, X115-E09, X115-H06, X115-A03, X115-D01, X115-F02, X115-G04, M29-D09, M145-D11, M06-D09 and M35-G04.

[0167] In a preferred embodiment, the protein is an antibody (e.g., a human antibody) having one or more (e.g., 1, 2, or 3) heavy chain CDRs selected from the corresponding CDRs of the group of heavy chains consisting of M162-A04, M160-G12, M142-H08, X63-G06, X101-A01, X81-B01, X67-D03, X67-G04, X115-B07, X115-D05, X115-E09, X115-H06, X115-A03, X115-D01, X115-F02, X115-G04, M29-D09, M145-D11, M06-D09 and M35-G04 and one or more (e.g., 1, 2, or 3) light chain CDRs selected from the corresponding CDRs of the group of light chains consisting of M162-A04, M160-G12, M142-H08, X63-G06, X101-A01, X81-B01, X67-D03, X67-G04, X115-B07, X115-D05, X115-E09, X115-H06, X115-A03, X115-D01, X115-F02, X115-G04, M29-D09, M145-D11, M06-D09 and M35-G04 (respectively).

[0168] In a preferred embodiment, the protein is an antibody (e.g., a human antibody) having the light and heavy chains of X81-B01.

[0169] In a preferred embodiment, the protein is an antibody (e.g., a human antibody) having the heavy chain of X81-B01.

[0170] In a preferred embodiment, the protein is an antibody (e.g., a human antibody) having the light chain of X81-B01.

[0171] In a preferred embodiment, the protein is an antibody (e.g., a human antibody) having light and heavy antibody variable regions of an antibody selected from X81-B01.

[0172] In a preferred embodiment, the protein is an antibody (e.g., a human antibody) having a heavy chain antibody variable region of X81-B01.

[0173] In a preferred embodiment, the protein is an antibody (e.g., a human antibody) having a light chain antibody variable region of X81-B01.

[0174] In a preferred embodiment, the protein is an antibody (e.g., a human antibody) having one or more (e.g., 1, 2, or 3) heavy chain CDRs from the corresponding CDRs of the heavy chain of X81-B01.

[0175] In a preferred embodiment, the protein is an antibody (e.g., a human antibody) having one or more (e.g., 1, 2, or 3) light chain CDRs from the corresponding CDRs of the light chain of X81-B01.

[0176] In a preferred embodiment, the protein is an antibody (e.g., a human antibody) having one or more (e.g., 1, 2, or 3) heavy chain CDRs from the heavy chain of X81-B01 and one or more (e.g., 1, 2, or 3) light chain CDRs from the corresponding CDRs of the light chain of X81-B01.

[0177] In a preferred embodiment, the protein is an antibody (e.g., a human antibody) having the light and heavy chains of X67-D03.

[0178] In a preferred embodiment, the protein is an antibody (e.g., a human antibody) having the heavy chain of X67-D03.

[0179] In a preferred embodiment, the protein is an antibody (e.g., a human antibody) having the light chain of X67-D03.

[0180] In a preferred embodiment, the protein is an antibody (e.g., a human antibody) having light and heavy antibody variable regions of an antibody selected from X67-D03.

[0181] In a preferred embodiment, the protein is an antibody (e.g., a human antibody) having a heavy chain antibody variable region of X67-D03.

[0182] In a preferred embodiment, the protein is an antibody (e.g., a human antibody) having a light chain antibody variable region of X67-D03.

[0183] In a preferred embodiment, the protein is an antibody (e.g., a human antibody) having one or more (e.g., 1, 2, or 3) heavy chain CDRs from the corresponding CDRs of the heavy chain of X67-D03.

[0184] In a preferred embodiment, the protein is an antibody (e.g., a human antibody) having one or more (e.g., 1, 2, or 3) light chain CDRs from the corresponding CDRs of the light chain of X67-D03.

[0185] In a preferred embodiment, the protein is an antibody (e.g., a human antibody) having one or more (e.g., 1, 2, or 3) heavy chain CDRs from the heavy chain of X67-D03 and one or more (e.g., 1, 2, or 3) light chain CDRs from the corresponding CDRs of the light chain of X67-D03.

[0186] In one embodiment, the HC and LC variable domain sequences are components of the same polypeptide chain.

[0187] In some embodiments, the plasma kallikrein binding protein has a serum residence time of 1 week, 2 weeks, 3 weeks, 4 weeks, 5 weeks or more, in vivo, e.g., in humans. In one embodiment, the plasma kallikrein binding protein is an IgG, e.g., an IgG1, IgG2, IgG3 or IgG4, that has a serum residence time of 1 week, 2 weeks, 3 weeks, 4 weeks, 5 weeks or more in vivo, e.g., in humans.

[0188] In some embodiments, the plasma kallikrein binding protein is physically associated with a moiety that improves serum residence time, e.g., a moiety described herein.

[0189] In another embodiment, the HC and LC variable domain sequences are components of different polypeptide chains. For example, the protein is an IgG, e.g., IgG1, IgG2, IgG3, or IgG4. The protein can be a soluble Fab (sFab).

[0190] In other implementations the protein includes a Fab2′, scFv, minibody, scFv::Fc fusion, Fab::HSA fusion, HSA::Fab fusion, Fab::HSA::Fab fusion, or other molecule that comprises the antigen combining site of one of the binding proteins herein. The VH and VL regions of these Fabs can be provided as IgG, Fab, Fab2, Fab2′, scFv, PEGylated Fab, PEGylated scFv, PEGylated Fab2, VH::CH1::HSA+LC, HSA::VH::CH1+LC, LC::HSA+VH::CH1, HSA::LC+VH::CH1, or other appropriate construction.

[0191] In one embodiment, the protein is a human or humanized antibody or is non-immunogenic in a human. For example, the protein includes one or more human antibody framework regions, e.g., all human framework regions.

[0192] In one embodiment, the protein includes a human Fc domain, or an Fc domain that is at least 95, 96, 97, 98, or 99% identical to a human Fc domain.

[0193] In one embodiment, the protein is a primate or primatized antibody or is non-immunogenic in a human. For example, the protein includes one or more primate antibody framework regions, e.g., all primate framework regions.

[0194] In one embodiment, the protein includes a primate Fc domain, or an Fc domain that is at least 95, 96, 97, 98, or 99% identical to a primate Fc domain. “Primate” includes humans (Homo sapiens), chimpanzees (Pan troglodytes and Pan paniscus (bonobos)), gorillas (Gorilla gorilla), gibons, monkeys, lemurs, aye-ayes (Daubentonia madagascariensis), and tarsiers.

[0195] In one embodiment, the protein includes human framework regions, or framework regions that are at least 95, 96, 97, 98, or 99% identical to human framework regions.

[0196] In certain embodiments, the protein includes no sequences from mice or rabbits (e.g., is not a murine or rabbit antibody).

[0197] In certain embodiments, the protein is capable of binding to a cell or tissue, e.g., that expresses plasma kallikrein.

[0198] In one embodiment, protein is physically associated with a nanoparticle, and can be used to guide a nanoparticle to a cell or tissue expressing plasma kallikrein.

[0199] In some aspects, the disclosure features a method of promoting wound healing in a subject, the method comprising:

[0200] administering an isolated protein (e.g., antibody, e.g., human antibody) that binds plasma kallikrein (e.g., human plasma kallikrein and/or mouse plasma kallikrein) and, e.g., does not bind prekallikrein (e.g., human prekallikrein and/or mouse prekallikrein) to the subject.

[0201] In some embodiments, the protein binds the same epitope or competes for binding with a kallikrein binding protein described herein. In some embodiments, the protein binds the same epitope or competes for binding with a protein (e.g., epi-Kal2) and/or a small molecule (e.g., AEBSF) described herein.

[0202] In some embodiments, the plasma kallikrein binding protein is administered in combination with another treatment for wound healing.

[0203] In some embodiments, the protein described herein is selected from the group consisting of M162-A04, M160-G12, M142-H08, X63-G06, X101-A01, X81-B01, X67-D03, X67-G04, X115-B07, X115-D05, X115-E09, X115-H06, X115-A03, X115-D01, X115-F02, X115-G04, M29-D09, M145-D11, M06-D09 and M35-G04.

[0204] In some embodiments, the plasma kallikrein binding protein competes with or binds the same epitope as X81-B01.

[0205] In some embodiments, the plasma kallikrein binding protein competes with or binds the same epitope as X67-D03.

[0206] In some embodiments, the plasma kallikrein binding protein does not bind prekallikrein (e.g., human prekallikrein), but binds to the active form of plasma kallikrein (e.g., human plasma kallikrein).

[0207] In certain embodiments, the protein binds at or near the active site of the catalytic domain of plasma kallikrein, or a fragment thereof, or binds an epitope that overlaps with the active site of plasma kallikrein.

[0208] In some embodiments, the protein binds to one or more amino acids that form the catalytic triad of plasma kallikrein: His434, Asp483, and/or Ser578 (numbering based on the human sequence). In other embodiments, the protein binds to one or more amino acids that form a region for substrate recognition: Arg551, Gln553, Tyr555, Thr558, and/or Arg560 (numbering based on the human sequence). In some embodiments, the plasma kallikrein binding protein binds one or more amino acids of: S478, N481, S525, and K526 (numbering based on the human kallikrein sequence).

[0209] In some embodiments, the protein binds to one or more amino acids of Ser479, Tyr563, and/or Asp585 (numbering based on the human sequence).

[0210] In some embodiments, the plasma kallikrein binding protein decreases Factor XIIa and/or bradykinin production by greater than about 5%, about 10%, about 15%, about 20%, about 25%, about 30%, about 35%, about 40%, about 45%, about 50%, about 55%, about 60%, about 65%, about 70%, about 75%, about 80%, about 85%, about 90%, or about 95% as compared to a standard, e.g., the Factor XIIa and/or bradykinin production under the same conditions but in the absence of the protein.

[0211] In some embodiments, the plasma kallikrein binding protein has an apparent inhibition constant (K_{i,app}) of less than 1000, 500, 100, 10, 5, 1, 0.5 or 0.2 nM.

[0212] In one embodiment, the HC and LC variable domain sequences are components of the same polypeptide chain.

[0213] In some embodiments, the plasma kallikrein binding protein has a serum residence time of 1 week, 2 weeks, 3 weeks, 4 weeks, 5 weeks or more, in vivo, e.g., in humans. In one embodiment, the plasma kallikrein binding protein is an IgG, e.g., an IgG1, IgG2, IgG3 or IgG4, that has a serum residence time of 1 week, 2 weeks, 3 weeks, 4 weeks, 5 weeks or more in vivo, e.g., in humans.

[0214] In some embodiments, the plasma kallikrein binding protein is physically associated with a moiety that improves serum residence time, e.g., a moiety described herein.

[0215] In another embodiment, the HC and LC variable domain sequences are components of different polypeptide chains. For example, the plasma kallikrein binding protein is an IgG, e.g., IgG1, IgG2, IgG3, or IgG4. The plasma kallikrein binding protein can be a soluble Fab (sFab).

[0216] In other implementations the plasma kallikrein binding protein includes a Fab2′, scFv, minibody, scFv::Fc fusion, Fab::HSA fusion, HSA::Fab fusion, Fab::HSA::Fab fusion, or other molecule that comprises the antigen combining site of one of the binding proteins herein. The VH and VL regions of these Fabs can be provided as IgG, Fab, Fab2, Fab2′, scFv, PEGylated Fab, PEGylated scFv, PEGylated Fab2, VH::CH1::HSA+LC, HSA::VH::CH1+LC, LC::HSA+VH::CH1, HSA::LC+VH::CH1, or other appropriate construction.

[0217] In one embodiment, the plasma kallikrein binding protein is a human or humanized antibody or is non-immunogenic in a human. For example, the protein includes one or more human antibody framework regions, e.g., all human framework regions.

[0218] In one embodiment, the plasma kallikrein binding protein includes a human Fc domain, or an Fc domain that is at least 95, 96, 97, 98, or 99% identical to a human Fc domain.

[0219] In one embodiment, the plasma kallikrein binding protein is a primate or primatized antibody or is non-immunogenic in a human. For example, the protein includes one or more primate antibody framework regions, e.g., all primate framework regions.

[0220] In one embodiment, the plasma kallikrein binding protein includes a primate Fc domain, or an Fc domain that is at least 95, 96, 97, 98, or 99% identical to a primate Fc domain. “Primate” includes humans (Homo sapiens), chimpanzees (Pan troglodytes and Pan paniscus (bonobos)), gorillas (Gorilla gorilla), gibons, monkeys, lemurs, aye-ayes (Daubentonia madagascariensis), and tarsiers.

[0221] In one embodiment, the plasma kallikrein binding protein includes human framework regions, or framework regions that are at least 95, 96, 97, 98, or 99% identical to human framework regions.

[0222] In certain embodiments, the plasma kallikrein binding protein includes no sequences from mice or rabbits (e.g., is not a murine or rabbit antibody).

[0223] In certain embodiments, the protein is capable of binding to a cell or tissue, e.g., that expresses plasma kallikrein.

[0224] In one embodiment, the plasma kallikrein binding protein is physically associated with a nanoparticle, and can be used to guide a nanoparticle to a cell or tissue expressing plasma kallikrein.

[0225] In some aspects, the disclosure features a method promoting wound healing in a subject, the method comprising:

[0226] administering an isolated protein (e.g., antibody, e.g., human antibody) comprising a heavy chain immunoglobulin variable domain sequence and a light chain immunoglobulin variable domain sequence to the subject, wherein:

[0227] the heavy chain immunoglobulin variable domain sequence comprises one, two, or three (e.g., three) CDR regions from the heavy chain variable domain of a protein described herein, and/or

[0228] the light chain immunoglobulin variable domain sequence comprises one, two, or three (e.g., three) CDR regions from the light chain variable domain of a protein described herein,

[0229] wherein the protein binds to plasma kallikrein.

[0230] In some embodiments, the protein is administered in combination with another treatment for wound healing.

[0231] In some embodiments, the heavy chain immunoglobulin variable domain sequence comprises one, two, or three (e.g., three) CDR regions from the heavy chain variable domain of M162-A04, M160-G12, M142-H08, X63-G06, X101-A01, X81-B01, X67-D03, X67-G04, X115-B07, X115-D05, X115-E09, X115-H06, X115-A03, X115-D01, X115-F02, X115-G04, M29-D09, M145-D11, M06-D09 and M35-G04, and/or

[0232] the light chain immunoglobulin variable domain sequence comprises one, two, or three (e.g., three) CDR regions from the light chain variable domain of M162-A04, M160-G12, M142-H08, X63-G06, X101-A01, X81-B01, X67-D03, X67-G04, X115-B07, X115-D05, X115-E09, X115-H06, X115-A03, X115-D01, X115-F02, X115-G04, M29-D09, M145-D11, M06-D09 and M35-G04 (respectively).

[0233] In some embodiments, the protein inhibits plasma kallikrein.

[0234] In some embodiments, the one, two, or three (e.g., three) CDR regions from the heavy chain variable domain are from X81-B01 and/or the one, two, or three (e.g., three) CDR regions from the light chain variable domain are from X81-B01.

[0235] In some embodiments, the one, two, or three (e.g., three) CDR regions from the heavy chain variable domain are from X67-D03 and/or the one, two, or three (e.g., three) CDR regions from the light chain variable domain are from X67-D03.

[0236] In some embodiments, the heavy chain immunoglobulin variable domain sequence comprises the heavy chain variable domain of a protein described herein, and/or the light chain immunoglobulin variable domain sequence comprises the light chain variable domain of a protein described herein.

[0237] In some embodiments, the heavy chain immunoglobulin variable domain sequence comprises the heavy chain variable domain of M162-A04, M160-G12, M142-H08, X63-G06, X101-A01, X81-B01, X67-D03, X67-G04, X115-B07, X115-D05, X115-E09, X115-H06, X115-A03, X115-D01, X115-F02, X115-G04, M29-D09, M145-D11, M06-D09 and M35-G04, and/or the light chain immunoglobulin variable domain sequence comprises the light chain variable domain of M162-A04, M160-G12, M142-H08, X63-G06, X101-A01, X81-B01, X67-D03, X67-G04, X115-B07, X115-D05, X115-E09, X115-H06, X115-A03, X115-D01, X115-F02, X115-G04, M29-D09, M145-D11, M06-D09 and M35-G04 (respectively).

[0238] In some embodiments, the heavy chain immunoglobulin variable domain sequence comprises the heavy chain variable domain of X81-B01, and/or the light chain immunoglobulin variable domain sequence comprises the light chain variable domain of X81-B01.

[0239] In some embodiments, the heavy chain immunoglobulin variable domain sequence comprises the heavy chain variable domain of X67-D03, and/or the light chain immunoglobulin variable domain sequence comprises the light chain variable domain of X67-D03.

[0240] In some embodiments, the protein comprises the heavy chain of a protein described herein, and/or the light chain of a protein described herein.

[0241] In some embodiments, the protein comprises the heavy chain of M162-A04, M160-G12, M142-H08, X63-G06, X101-A01, X81-B01, X67-D03, X67-G04, X115-B07, X115-D05, X115-E09, X115-H06, X115-A03, X115-D01, X115-F02, X115-G04, M29-D09, M145-D11, M06-D09 and M35-G04, and/or the light chain of M162-A04, M160-G12, M142-H08, X63-G06, X101-A01, X81-B01, X67-D03, X67-G04, X115-B07, X115-D05, X115-E09, X115-H06, X115-A03, X115-D01, X115-F02, X115-G04, M29-D09, M145-D11, M06-D09 and M35-G04 (respectively).

[0242] In some embodiments, the protein comprises the heavy chain of X81-B01, and/or the light chain of X81-B01.

[0243] In some embodiments, the protein comprises the heavy chain of X67-D03, and/or the light chain of X67-D03.

[0244] In some embodiments, the plasma kallikrein binding protein does not bind prekallikrein (e.g., human prekallikrein and/or murine prekallikrein), but binds to the active form of plasma kallikrein (e.g., human plasma kallikrein and/or murine plasma kallikrein).

[0245] In some embodiments, the plasma kallikrein binding protein decreases Factor XIIa and/or bradykinin production by greater than about 5%, about 10%, about 15%, about 20%, about 25%, about 30%, about 35%, about 40%, about 45%, about 50%, about 55%, about 60%, about 65%, about 70%, about 75%, about 80%, about 85%, about 90%, or about 95% as compared to a standard, e.g., the Factor XIIa and/or bradykinin production under the same conditions but in the absence of the protein.

[0246] In some embodiments, the protein includes one or more of the following characteristics: (a) a human CDR or human framework region; (b) the HC immunoglobulin variable domain sequence comprises one or more (e.g., 1, 2, or 3) CDRs that are at least 85, 88, 89, 90, 91, 92, 93, 94, 95, 96, 97, 98, 99, or 100% identical to a CDR of a HC variable domain described herein; (c) the LC immunoglobulin variable domain sequence comprises one or more (e.g., 1, 2, or 3) CDRs that are at least 85, 88, 89, 90, 91, 92, 93, 94, 95, 96, 97, 98, 99, or 100% identical to a CDR of a LC variable domain described herein; (d) the LC immunoglobulin variable domain sequence is at least 85, 88, 89, 90, 91, 92, 93, 94, 95, 96, 97, 98, 99, or 100% identical to a LC variable domain described herein (e.g., overall or in framework regions or CDRs); (e) the HC immunoglobulin variable domain sequence is at least 85, 88, 89, 90, 91, 92, 93, 94, 95, 96, 97, 98, 99, or 100% identical to a HC variable domain described herein (e.g., overall or in framework regions or CDRs); (f) the protein binds an epitope bound by a protein described herein, or competes for binding with a protein described herein; and (g) a primate CDR or primate framework region.

[0247] In some embodiments, the protein has an apparent inhibition constant (K_{i,app}) of less than 1000, 500, 100, 5, 1, 0.5 or 0.2 nM.

[0248] In some embodiments, the antibody does not bind prekallikrein (e.g., human prekallikrein and/or murine prekallikrein), but binds to the active form of plasma kallikrein (e.g., human plasma kallikrein and/or murine plasma kallikrein).

[0249] In a preferred embodiment, the protein is an antibody (e.g., a human antibody) having the light and heavy chains of antibodies selected from the group consisting of M162-A04, M160-G12, M142-H08, X63-G06, X101-A01, X81-B01, X67-D03, X67-G04, X115-B07, X115-D05, X115-E09, X115-H06, X115-A03, X115-D01, X115-F02, X115-G04, M29-D09, M145-D11, M06-D09 and M35-G04.

[0250] In a preferred embodiment, the protein is an antibody (e.g., a human antibody) having the heavy chain of an antibody selected from the group consisting of: M162-A04, M160-G12, M142-H08, X63-G06, X101-A01, X81-B01, X67-D03, X67-G04, X115-B07, X115-D05, X115-E09, X115-H06, X115-A03, X115-D01, X115-F02, X115-G04, M29-D09, M145-D11, M06-D09 and M35-G04.

[0251] In a preferred embodiment, the protein is an antibody (e.g., a human antibody) having the light chain of an antibody selected from the group consisting of: M162-A04, M160-G12, M142-H08, X63-G06, X101-A01, X81-B01, X67-D03, X67-G04, X115-B07, X115-D05, X115-E09, X115-H06, X115-A03, X115-D01, X115-F02, X115-G04, M29-D09, M145-D11, M06-D09 and M35-G04.

[0252] In a preferred embodiment, the protein is an antibody (e.g., a human antibody) having light and heavy antibody variable regions of an antibody selected from the group consisting of M162-A04, M160-G12, M142-H08, X63-G06, X101-A01, X81-B01, X67-D03, X67-G04, X115-B07, X115-D05, X115-E09, X115-H06, X115-A03, X115-D01, X115-F02, X115-G04, M29-D09, M145-D11, M06-D09 and M35-G04.

[0253] In a preferred embodiment, the protein is an antibody (e.g., a human antibody) having a heavy chain antibody variable region of an antibody selected from the group consisting of: M162-A04, M160-G12, M142-H08, X63-G06, X101-A01, X81-B01, X67-D03, X67-G04, X115-B07, X115-D05, X115-E09, X115-H06, X115-A03, X115-D01, X115-F02, X115-G04, M29-D09, M145-D11, M06-D09 and M35-G04.

[0254] In a preferred embodiment, the protein is an antibody (e.g., a human antibody) having a light chain antibody variable region of an antibody selected from the group consisting of: M162-A04, M160-G12, M142-H08, X63-G06, X101-A01, X81-B01, X67-D03, X67-G04, X115-B07, X115-D05, X115-E09, X115-H06, X115-A03, X115-D01, X115-F02, X115-G04, M29-D09, M145-D11, M06-D09 and M35-G04.

[0255] In a preferred embodiment, the protein is an antibody (e.g., a human antibody) having one or more (e.g., 1, 2, or 3) heavy chain CDRs selected from the corresponding CDRs of the group of heavy chains consisting of M162-A04, M160-G12, M142-H08, X63-G06, X101-A01, X81-B01, X67-D03, X67-G04, X115-B07, X115-D05, X115-E09, X115-H06, X115-A03, X115-D01, X115-F02, X115-G04, M29-D09, M145-D11, M06-D09 and M35-G04.

[0256] In a preferred embodiment, the protein is an antibody (e.g., a human antibody) having one or more (e.g., 1, 2, or 3) light chain CDRs selected from the corresponding CDRs of the group of light chains consisting of M162-A04, M160-G12, M142-H08, X63-G06, X101-A01, X81-B01, X67-D03, X67-G04, X115-B07, X115-D05, X115-E09, X115-H06, X115-A03, X115-D01, X115-F02, X115-G04, M29-D09, M145-D11, M06-D09 and M35-G04.

[0257] In a preferred embodiment, the protein is an antibody (e.g., a human antibody) having one or more (e.g., 1, 2, or 3) heavy chain CDRs selected from the corresponding CDRs of the group of heavy chains consisting of M162-A04, M160-G12, M142-H08, X63-G06, X101-A01, X81-B01, X67-D03, X67-G04, X115-B07, X115-D05, X115-E09, X115-H06, X115-A03, X115-D01, X115-F02, X115-G04, M29-D09, M145-D11, M06-D09 and M35-G04 and one or more (e.g., 1, 2, or 3) light chain CDRs selected from the corresponding CDRs of the group of light chains consisting of M162-A04, M160-G12, M142-H08, X63-G06, X101-A01, X81-B01, X67-D03, X67-G04, X115-B07, X115-D05, X115-E09, X115-H06, X115-A03, X115-D01, X115-F02, X115-G04, M29-D09, M145-D11, M06-D09 and M35-G04 (respectively).

[0258] In a preferred embodiment, the protein is an antibody (e.g., a human antibody) having the light and heavy chains of X81-B01.

[0259] In a preferred embodiment, the protein is an antibody (e.g., a human antibody) having the heavy chain of X81-B01.

[0260] In a preferred embodiment, the protein is an antibody (e.g., a human antibody) having the light chain of X81-B01.

[0261] In a preferred embodiment, the protein is an antibody (e.g., a human antibody) having light and heavy antibody variable regions of an antibody selected from X81-B01.

[0262] In a preferred embodiment, the protein is an antibody (e.g., a human antibody) having a heavy chain antibody variable region of X81-B01.

[0263] In a preferred embodiment, the protein is an antibody (e.g., a human antibody) having a light chain antibody variable region of X81-B01.

[0264] In a preferred embodiment, the protein is an antibody (e.g., a human antibody) having one or more (e.g., 1, 2, or 3) heavy chain CDRs from the corresponding CDRs of the heavy chain of X81-B01.

[0265] In a preferred embodiment, the protein is an antibody (e.g., a human antibody) having one or more (e.g., 1, 2, or 3) light chain CDRs from the corresponding CDRs of the light chain of X81-B01.

[0266] In a preferred embodiment, the protein is an antibody (e.g., a human antibody) having one or more (e.g., 1, 2, or 3) heavy chain CDRs from the heavy chain of X81-B01 and one or more (e.g., 1, 2, or 3) light chain CDRs from the corresponding CDRs of the light chain of X81-B01.

[0267] In a preferred embodiment, the protein is an antibody (e.g., a human antibody) having the light and heavy chains of X67-D03.

[0268] In a preferred embodiment, the protein is an antibody (e.g., a human antibody) having the heavy chain of X67-D03.

[0269] In a preferred embodiment, the protein is an antibody (e.g., a human antibody) having the light chain of X67-D03.

[0270] In a preferred embodiment, the protein is an antibody (e.g., a human antibody) having light and heavy antibody variable regions of an antibody selected from X67-D03.

[0271] In a preferred embodiment, the protein is an antibody (e.g., a human antibody) having a heavy chain antibody variable region of X67-D03.

[0272] In a preferred embodiment, the protein is an antibody (e.g., a human antibody) having a light chain antibody variable region of X67-D03.

[0273] In a preferred embodiment, the protein is an antibody (e.g., a human antibody) having one or more (e.g., 1, 2, or 3) heavy chain CDRs from the corresponding CDRs of the heavy chain of X67-D03.

[0274] In a preferred embodiment, the protein is an antibody (e.g., a human antibody) having one or more (e.g., 1, 2, or 3) light chain CDRs from the corresponding CDRs of the light chain of X67-D03.

[0275] In a preferred embodiment, the protein is an antibody (e.g., a human antibody) having one or more (e.g., 1, 2, or 3) heavy chain CDRs from the heavy chain of X67-D03 and one or more (e.g., 1, 2, or 3) light chain CDRs from the corresponding CDRs of the light chain of X67-D03.

[0276] In one embodiment, the HC and LC variable domain sequences are components of the same polypeptide chain.

[0277] In some embodiments, the plasma kallikrein binding protein has a serum residence time of 1 week, 2 weeks, 3 weeks, 4 weeks, 5 weeks or more, in vivo, e.g., in humans. In one embodiment, the plasma kallikrein binding protein is an IgG, e.g., an IgG1, IgG2, IgG3 or IgG4, that has a serum residence time of 1 week, 2 weeks, 3 weeks, 4 weeks, 5 weeks or more in vivo, e.g., in humans.

[0278] In some embodiments, the plasma kallikrein binding protein is physically associated with a moiety that improves serum residence time, e.g., a moiety described herein.

[0279] In another embodiment, the HC and LC variable domain sequences are components of different polypeptide chains. For example, the protein is an IgG, e.g., IgG1, IgG2, IgG3, or IgG4. The protein can be a soluble Fab (sFab).

[0280] In other implementations the protein includes a Fab2′, scFv, minibody, scFv::Fc fusion, Fab::HSA fusion, HSA::Fab fusion, Fab::HSA::Fab fusion, or other molecule that comprises the antigen combining site of one of the binding proteins herein. The VH and VL regions of these Fabs can be provided as IgG, Fab, Fab2, Fab2′, scFv, PEGylated Fab, PEGylated scFv, PEGylated Fab2, VH::CH1::HSA+LC, HSA::VH::CH1+LC, LC::HSA+VH::CH1, HSA::LC+VH::CH1, or other appropriate construction.

[0281] In one embodiment, the protein is a human or humanized antibody or is non-immunogenic in a human. For example, the protein includes one or more human antibody framework regions, e.g., all human framework regions.

[0282] In one embodiment, the protein includes a human Fc domain, or an Fc domain that is at least 95, 96, 97, 98, or 99% identical to a human Fc domain.

[0283] In one embodiment, the protein is a primate or primatized antibody or is non-immunogenic in a human. For example, the protein includes one or more primate antibody framework regions, e.g., all primate framework regions.

[0284] In one embodiment, the protein includes a primate Fc domain, or an Fc domain that is at least 95, 96, 97, 98, or 99% identical to a primate Fc domain. “Primate” includes humans (Homo sapiens), chimpanzees (Pan troglodytes and Pan paniscus (bonobos)), gorillas (Gorilla gorilla), gibons, monkeys, lemurs, aye-ayes (Daubentonia madagascariensis), and tarsiers.

[0285] In one embodiment, the protein includes human framework regions, or framework regions that are at least 95, 96, 97, 98, or 99% identical to human framework regions.

[0286] In certain embodiments, the protein includes no sequences from mice or rabbits (e.g., is not a murine or rabbit antibody).

[0287] In certain embodiments, the protein is capable of binding to a cell or tissue, e.g., that expresses plasma kallikrein.

[0288] In one embodiment, protein is physically associated with a nanoparticle, and can be used to guide a nanoparticle to a cell or tissue expressing plasma kallikrein.

[0289] In some aspects, the disclosure features a method of treating or preventing rheumatoid arthritis in a subject, the method comprising:

[0290] administering an isolated protein (e.g., antibody, e.g., human antibody) comprising a heavy chain immunoglobulin variable domain sequence and a light chain immunoglobulin variable domain sequence to the subject, wherein:

[0291] the heavy chain immunoglobulin variable domain sequence comprises one, two, or three (e.g., three) CDR regions from the heavy chain variable domain of a protein described herein, and/or

[0292] the light chain immunoglobulin variable domain sequence comprises one, two, or three (e.g., three) CDR regions from the light chain variable domain of a protein described herein,

[0293] wherein the protein binds to plasma kallikrein.

[0294] In some embodiments, the plasma kallikrein binding protein does not bind prekallikrein (e.g., human prekallikrein and/or murine prekallikrein), but binds to the active form of plasma kallikrein (e.g., human plasma kallikrein and/or murine plasma kallikrein).

[0295] In some embodiments, the protein is administered in combination with another treatment for rheumatoid arthritis.

[0296] In some embodiments, the protein inhibits plasma kallikrein (e.g., human plasma kallikrein and/or murine plasma kallikrein).

[0297] In some embodiments, the heavy chain immunoglobulin variable domain sequence comprises the heavy chain variable domain of a protein described herein, and/or the light chain immunoglobulin variable domain sequence comprises the light chain variable domain of a protein described herein.

[0298] In some embodiments, the protein comprises the heavy chain of a protein described herein, and/or the light chain of a protein described herein.

[0299] In some aspects, the disclosure features a method of treating or preventing gout in a subject, the method comprising:

[0300] administering an isolated protein (e.g., antibody, e.g., human antibody) comprising a heavy chain immunoglobulin variable domain sequence and a light chain immunoglobulin variable domain sequence to the subject, wherein:

[0301] the heavy chain immunoglobulin variable domain sequence comprises one, two, or three (e.g., three) CDR regions from the heavy chain variable domain of a protein described herein, and/or

[0302] the light chain immunoglobulin variable domain sequence comprises one, two, or three (e.g., three) CDR regions from the light chain variable domain of a protein described herein,

[0303] wherein the protein binds to plasma kallikrein.

[0304] In some embodiments, the plasma kallikrein binding protein does not bind prekallikrein (e.g., human prekallikrein and/or murine prekallikrein), but binds to the active form of plasma kallikrein (e.g., human plasma kallikrein and/or murine plasma kallikrein).

[0305] In some embodiments, the protein is administered in combination with another treatment for gout.

[0306] In some embodiments, the protein inhibits plasma kallikrein (e.g., human plasma kallikrein and/or murine plasma kallikrein).

[0307] In some embodiments, the heavy chain immunoglobulin variable domain sequence comprises the heavy chain variable domain of a protein described herein, and/or the light chain immunoglobulin variable domain sequence comprises the light chain variable domain of a protein described herein.

[0308] In some embodiments, the protein comprises the heavy chain of a protein described herein, and/or the light chain of a protein described herein.

[0309] In some aspects, the disclosure features a method of treating or preventing intestinal bowel disease in a subject, the method comprising:

[0310] administering an isolated protein (e.g., antibody, e.g., human antibody) comprising a heavy chain immunoglobulin variable domain sequence and a light chain immunoglobulin variable domain sequence to the subject, wherein:

[0311] the heavy chain immunoglobulin variable domain sequence comprises one, two, or three (e.g., three) CDR regions from the heavy chain variable domain of a protein described herein, and/or

[0312] the light chain immunoglobulin variable domain sequence comprises one, two, or three (e.g., three) CDR regions from the light chain variable domain of a protein described herein,

[0313] wherein the protein binds to plasma kallikrein.

[0314] In some embodiments, the plasma kallikrein binding protein does not bind prekallikrein (e.g., human prekallikrein and/or murine prekallikrein), but binds to the active form of plasma kallikrein (e.g., human plasma kallikrein and/or murine plasma kallikrein).

[0315] In some embodiments, the protein is administered in combination with another treatment for intestinal bowel disease.

[0316] In some embodiments, the protein inhibits plasma kallikrein (e.g., human plasma kallikrein and/or murine plasma kallikrein).

[0317] In some embodiments, the heavy chain immunoglobulin variable domain sequence comprises the heavy chain variable domain of a protein described herein, and/or the light chain immunoglobulin variable domain sequence comprises the light chain variable domain of a protein described herein.

[0318] In some embodiments, the protein comprises the heavy chain of a protein described herein, and/or the light chain of a protein described herein.

[0319] In some aspects, the disclosure features a method of treating or preventing oral mucositis in a subject, the method comprising:

[0320] administering an isolated protein (e.g., antibody, e.g., human antibody) comprising a heavy chain immunoglobulin variable domain sequence and a light chain immunoglobulin variable domain sequence to the subject, wherein:

[0321] the heavy chain immunoglobulin variable domain sequence comprises one, two, or three (e.g., three) CDR regions from the heavy chain variable domain of a protein described herein, and/or

[0322] the light chain immunoglobulin variable domain sequence comprises one, two, or three (e.g., three) CDR regions from the light chain variable domain of a protein described herein,

[0323] wherein the protein binds to plasma kallikrein.

[0324] In some embodiments, the plasma kallikrein binding protein does not bind prekallikrein (e.g., human prekallikrein and/or murine prekallikrein), but binds to the active form of plasma kallikrein (e.g., human plasma kallikrein and/or murine plasma kallikrein).

[0325] In some embodiments, the protein is administered in combination with another treatment for oral mucositis.

[0326] In some embodiments, the protein inhibits plasma kallikrein (e.g., human plasma kallikrein and/or murine plasma kallikrein).

[0327] In some embodiments, the heavy chain immunoglobulin variable domain sequence comprises the heavy chain variable domain of a protein described herein, and/or the light chain immunoglobulin variable domain sequence comprises the light chain variable domain of a protein described herein.

[0328] In some embodiments, the protein comprises the heavy chain of a protein described herein, and/or the light chain of a protein described herein.

[0329] In some aspects, the disclosure features a method of treating or preventing neuropathic pain in a subject, the method comprising:

[0330] administering an isolated protein (e.g., antibody, e.g., human antibody) comprising a heavy chain immunoglobulin variable domain sequence and a light chain immunoglobulin variable domain sequence to the subject, wherein:

[0331] the heavy chain immunoglobulin variable domain sequence comprises one, two, or three (e.g., three) CDR regions from the heavy chain variable domain of a protein described herein, and/or

[0332] the light chain immunoglobulin variable domain sequence comprises one, two, or three (e.g., three) CDR regions from the light chain variable domain of a protein described herein,

[0333] wherein the protein binds to plasma kallikrein.

[0334] In some embodiments, the plasma kallikrein binding protein does not bind prekallikrein (e.g., human prekallikrein and/or murine prekallikrein), but binds to the active form of plasma kallikrein (e.g., human plasma kallikrein and/or murine plasma kallikrein).

[0335] In some embodiments, the protein is administered in combination with another treatment for neuropathic pain.

[0336] In some embodiments, the protein inhibits plasma kallikrein (e.g., human plasma kallikrein and/or murine plasma kallikrein).

[0337] In some embodiments, the heavy chain immunoglobulin variable domain sequence comprises the heavy chain variable domain of a protein described herein, and/or the light chain immunoglobulin variable domain sequence comprises the light chain variable domain of a protein described herein.

[0338] In some embodiments, the protein comprises the heavy chain of a protein described herein, and/or the light chain of a protein described herein.

[0339] In some aspects, the disclosure features a method of treating or preventing inflammatory pain in a subject, the method comprising:

[0340] administering an isolated protein (e.g., antibody, e.g., human antibody) comprising a heavy chain immunoglobulin variable domain sequence and a light chain immunoglobulin variable domain sequence to the subject, wherein:

[0341] the heavy chain immunoglobulin variable domain sequence comprises one, two, or three (e.g., three) CDR regions from the heavy chain variable domain of a protein described herein, and/or

[0342] the light chain immunoglobulin variable domain sequence comprises one, two, or three (e.g., three) CDR regions from the light chain variable domain of a protein described herein,

[0343] wherein the protein binds to plasma kallikrein.

[0344] In some embodiments, the plasma kallikrein binding protein does not bind prekallikrein (e.g., human prekallikrein and/or murine prekallikrein), but binds to the active form of plasma kallikrein (e.g., human plasma kallikrein and/or murine plasma kallikrein).

[0345] In some embodiments, the protein is administered in combination with another treatment for inflammatory pain.

[0346] In some embodiments, the protein inhibits plasma kallikrein (e.g., human plasma kallikrein and/or murine plasma kallikrein).

[0347] In some embodiments, the heavy chain immunoglobulin variable domain sequence comprises the heavy chain variable domain of a protein described herein, and/or the light chain immunoglobulin variable domain sequence comprises the light chain variable domain of a protein described herein.

[0348] In some embodiments, the protein comprises the heavy chain of a protein described herein, and/or the light chain of a protein described herein.

[0349] In some aspects, the disclosure features a method of treating or preventing spinal stenosis-degenerative spine disease in a subject, the method comprising:

[0350] administering an isolated protein (e.g., antibody, e.g., human antibody) comprising a heavy chain immunoglobulin variable domain sequence and a light chain immunoglobulin variable domain sequence to the subject, wherein:

[0351] the heavy chain immunoglobulin variable domain sequence comprises one, two, or three (e.g., three) CDR regions from the heavy chain variable domain of a protein described herein, and/or

[0352] the light chain immunoglobulin variable domain sequence comprises one, two, or three (e.g., three) CDR regions from the light chain variable domain of a protein described herein,

[0353] wherein the protein binds to plasma kallikrein.

[0354] In some embodiments, the plasma kallikrein binding protein does not bind prekallikrein (e.g., human prekallikrein and/or murine prekallikrein), but binds to the active form of plasma kallikrein (e.g., human plasma kallikrein and/or murine plasma kallikrein).

[0355] In some embodiments, the protein is administered in combination with another treatment for spinal stenosis-degenerative spine disease.

[0356] In some embodiments, the protein inhibits plasma kallikrein (e.g., human plasma kallikrein and/or murine plasma kallikrein).

[0357] In some embodiments, the heavy chain immunoglobulin variable domain sequence comprises the heavy chain variable domain of a protein described herein, and/or the light chain immunoglobulin variable domain sequence comprises the light chain variable domain of a protein described herein.

[0358] In some embodiments, the protein comprises the heavy chain of a protein described herein, and/or the light chain of a protein described herein.

[0359] In some aspects, the disclosure features a method of treating or preventing arterial or venous thrombosis in a subject, the method comprising:

[0360] administering an isolated protein (e.g., antibody, e.g., human antibody) comprising a heavy chain immunoglobulin variable domain sequence and a light chain immunoglobulin variable domain sequence to the subject, wherein:

[0361] the heavy chain immunoglobulin variable domain sequence comprises one, two, or three (e.g., three) CDR regions from the heavy chain variable domain of a protein described herein, and/or

[0362] the light chain immunoglobulin variable domain sequence comprises one, two, or three (e.g., three) CDR regions from the light chain variable domain of a protein described herein,

[0363] wherein the protein binds to plasma kallikrein.

[0364] In some embodiments, the plasma kallikrein binding protein does not bind prekallikrein (e.g., human prekallikrein and/or murine prekallikrein), but binds to the active form of plasma kallikrein (e.g., human plasma kallikrein and/or murine plasma kallikrein).

[0365] In some embodiments, the protein is administered in combination with another treatment for arterial or venous thrombosis.

[0366] In some embodiments, the protein inhibits plasma kallikrein (e.g., human plasma kallikrein and/or murine plasma kallikrein).

[0367] In some embodiments, the heavy chain immunoglobulin variable domain sequence comprises the heavy chain variable domain of a protein described herein, and/or the light chain immunoglobulin variable domain sequence comprises the light chain variable domain of a protein described herein.

[0368] In some embodiments, the protein comprises the heavy chain of a protein described herein, and/or the light chain of a protein described herein.

[0369] In some aspects, the disclosure features a method of treating or preventing post operative ileus in a subject, the method comprising:

[0370] administering an isolated protein (e.g., antibody, e.g., human antibody) comprising a heavy chain immunoglobulin variable domain sequence and a light chain immunoglobulin variable domain sequence to the subject, wherein:

[0371] the heavy chain immunoglobulin variable domain sequence comprises one, two, or three (e.g., three) CDR regions from the heavy chain variable domain of a protein described herein, and/or

[0372] the light chain immunoglobulin variable domain sequence comprises one, two, or three (e.g., three) CDR regions from the light chain variable domain of a protein described herein,

[0373] wherein the protein binds to plasma kallikrein.

[0374] In some embodiments, the plasma kallikrein binding protein does not bind prekallikrein (e.g., human prekallikrein and/or murine prekallikrein), but binds to the active form of plasma kallikrein (e.g., human plasma kallikrein and/or murine plasma kallikrein).

[0375] In some embodiments, the protein is administered in combination with another treatment for post operative ileus.

[0376] In some embodiments, the protein inhibits plasma kallikrein (e.g., human plasma kallikrein and/or murine plasma kallikrein).

[0377] In some embodiments, the heavy chain immunoglobulin variable domain sequence comprises the heavy chain variable domain of a protein described herein, and/or the light chain immunoglobulin variable domain sequence comprises the light chain variable domain of a protein described herein.

[0378] In some embodiments, the protein comprises the heavy chain of a protein described herein, and/or the light chain of a protein described herein.

[0379] In some aspects, the disclosure features a method of treating or preventing aortic aneurysm in a subject, the method comprising:

[0380] administering an isolated protein (e.g., antibody, e.g., human antibody) comprising a heavy chain immunoglobulin variable domain sequence and a light chain immunoglobulin variable domain sequence to the subject, wherein:

[0381] the heavy chain immunoglobulin variable domain sequence comprises one, two, or three (e.g., three) CDR regions from the heavy chain variable domain of a protein described herein, and/or

[0382] the light chain immunoglobulin variable domain sequence comprises one, two, or three (e.g., three) CDR regions from the light chain variable domain of a protein described herein,

[0383] wherein the protein binds to plasma kallikrein.

[0384] In some embodiments, the plasma kallikrein binding protein does not bind prekallikrein (e.g., human prekallikrein and/or murine prekallikrein), but binds to the active form of plasma kallikrein (e.g., human plasma kallikrein and/or murine plasma kallikrein).

[0385] In some embodiments, the protein is administered in combination with another treatment for aortic aneurysm.

[0386] In some embodiments, the protein inhibits plasma kallikrein (e.g., human plasma kallikrein and/or murine plasma kallikrein).

[0387] In some embodiments, the heavy chain immunoglobulin variable domain sequence comprises the heavy chain variable domain of a protein described herein, and/or the light chain immunoglobulin variable domain sequence comprises the light chain variable domain of a protein described herein.

[0388] In some embodiments, the protein comprises the heavy chain of a protein described herein, and/or the light chain of a protein described herein.

[0389] In some aspects, the disclosure features a method of treating or preventing osteoarthritis in a subject, the method comprising:

[0390] administering an isolated protein (e.g., antibody, e.g., human antibody) comprising a heavy chain immunoglobulin variable domain sequence and a light chain immunoglobulin variable domain sequence to the subject, wherein:

[0391] the heavy chain immunoglobulin variable domain sequence comprises one, two, or three (e.g., three) CDR regions from the heavy chain variable domain of a protein described herein, and/or

[0392] the light chain immunoglobulin variable domain sequence comprises one, two, or three (e.g., three) CDR regions from the light chain variable domain of a protein described herein,

[0393] wherein the protein binds to plasma kallikrein.

[0394] In some embodiments, the plasma kallikrein binding protein does not bind prekallikrein (e.g., human prekallikrein and/or murine prekallikrein), but binds to the active form of plasma kallikrein (e.g., human plasma kallikrein and/or murine plasma kallikrein).

[0395] In some embodiments, the protein is administered in combination with another treatment for osteoarthritis.

[0396] In some embodiments, the protein inhibits plasma kallikrein (e.g., human plasma kallikrein and/or murine plasma kallikrein).

[0397] In some embodiments, the heavy chain immunoglobulin variable domain sequence comprises the heavy chain variable domain of a protein described herein, and/or the light chain immunoglobulin variable domain sequence comprises the light chain variable domain of a protein described herein.

[0398] In some embodiments, the protein comprises the heavy chain of a protein described herein, and/or the light chain of a protein described herein.

[0399] In some aspects, the disclosure features a method of treating or preventing vasculitis in a subject, the method comprising:

[0400] administering an isolated protein (e.g., antibody, e.g., human antibody) comprising a heavy chain immunoglobulin variable domain sequence and a light chain immunoglobulin variable domain sequence to the subject, wherein:

[0401] the heavy chain immunoglobulin variable domain sequence comprises one, two, or three (e.g., three) CDR regions from the heavy chain variable domain of a protein described herein, and/or

[0402] the light chain immunoglobulin variable domain sequence comprises one, two, or three (e.g., three) CDR regions from the light chain variable domain of a protein described herein,

[0403] wherein the protein binds to plasma kallikrein.

[0404] In some embodiments, the plasma kallikrein binding protein does not bind prekallikrein (e.g., human prekallikrein and/or murine prekallikrein), but binds to the active form of plasma kallikrein (e.g., human plasma kallikrein and/or murine plasma kallikrein).

[0405] In some embodiments, the protein is administered in combination with another treatment for vasculitis.

[0406] In some embodiments, the protein inhibits plasma kallikrein (e.g., human plasma kallikrein and/or murine plasma kallikrein).

[0407] In some embodiments, the heavy chain immunoglobulin variable domain sequence comprises the heavy chain variable domain of a protein described herein, and/or the light chain immunoglobulin variable domain sequence comprises the light chain variable domain of a protein described herein.

[0408] In some embodiments, the protein comprises the heavy chain of a protein described herein, and/or the light chain of a protein described herein.

[0409] In some aspects, the disclosure features a method of treating or preventing head trauma or peri-tumor brain edema in a subject, the method comprising:

[0410] administering an isolated protein (e.g., antibody, e.g., human antibody) comprising a heavy chain immunoglobulin variable domain sequence and a light chain immunoglobulin variable domain sequence to the subject, wherein:

[0411] the heavy chain immunoglobulin variable domain sequence comprises one, two, or three (e.g., three) CDR regions from the heavy chain variable domain of a protein described herein, and/or

[0412] the light chain immunoglobulin variable domain sequence comprises one, two, or three (e.g., three) CDR regions from the light chain variable domain of a protein described herein,

[0413] wherein the protein binds to plasma kallikrein.

[0414] In some embodiments, the plasma kallikrein binding protein does not bind prekallikrein (e.g., human prekallikrein and/or murine prekallikrein), but binds to the active form of plasma kallikrein (e.g., human plasma kallikrein and/or murine plasma kallikrein).

[0415] In some embodiments, the protein is administered in combination with another treatment for head trauma or peri-tumor brain edema.

[0416] In some embodiments, the protein inhibits plasma kallikrein (e.g., human plasma kallikrein and/or murine plasma kallikrein).

[0417] In some embodiments, the heavy chain immunoglobulin variable domain sequence comprises the heavy chain variable domain of a protein described herein, and/or the light chain immunoglobulin variable domain sequence comprises the light chain variable domain of a protein described herein.

[0418] In some embodiments, the protein comprises the heavy chain of a protein described herein, and/or the light chain of a protein described herein.

[0419] In some aspects, the disclosure features a method of treating or preventing sepsis in a subject, the method comprising:

[0420] administering an isolated protein (e.g., antibody, e.g., human antibody) comprising a heavy chain immunoglobulin variable domain sequence and a light chain immunoglobulin variable domain sequence to the subject, wherein:

[0421] the heavy chain immunoglobulin variable domain sequence comprises one, two, or three (e.g., three) CDR regions from the heavy chain variable domain of a protein described herein, and/or

[0422] the light chain immunoglobulin variable domain sequence comprises one, two, or three (e.g., three) CDR regions from the light chain variable domain of a protein described herein,

[0423] wherein the protein binds to plasma kallikrein.

[0424] In some embodiments, the plasma kallikrein binding protein does not bind prekallikrein (e.g., human prekallikrein and/or murine prekallikrein), but binds to the active form of plasma kallikrein (e.g., human plasma kallikrein and/or murine plasma kallikrein).

[0425] In some embodiments, the protein is administered in combination with another treatment for sepsis.

[0426] In some embodiments, the protein inhibits plasma kallikrein (e.g., human plasma kallikrein and/or murine plasma kallikrein).

[0427] In some embodiments, the heavy chain immunoglobulin variable domain sequence comprises the heavy chain variable domain of a protein described herein, and/or the light chain immunoglobulin variable domain sequence comprises the light chain variable domain of a protein described herein.

[0428] In some embodiments, the protein comprises the heavy chain of a protein described herein, and/or the light chain of a protein described herein.

[0429] In some aspects, the disclosure features a method of treating or preventing acute middle cerebral artery (MCA) ischemic event (stroke) in a subject, the method comprising:

[0430] administering an isolated protein (e.g., antibody, e.g., human antibody) comprising a heavy chain immunoglobulin variable domain sequence and a light chain immunoglobulin variable domain sequence to the subject, wherein:

[0431] the heavy chain immunoglobulin variable domain sequence comprises one, two, or three (e.g., three) CDR regions from the heavy chain variable domain of a protein described herein, and/or

[0432] the light chain immunoglobulin variable domain sequence comprises one, two, or three (e.g., three) CDR regions from the light chain variable domain of a protein described herein,

[0433] wherein the protein binds to plasma kallikrein.

[0434] In some embodiments, the plasma kallikrein binding protein does not bind prekallikrein (e.g., human prekallikrein and/or murine prekallikrein), but binds to the active form of plasma kallikrein (e.g., human plasma kallikrein and/or murine plasma kallikrein).

[0435] In some embodiments, the protein is administered in combination with another treatment for acute middle cerebral artery (MCA) ischemic event (stroke).

[0436] In some embodiments, the protein inhibits plasma kallikrein (e.g., human plasma kallikrein and/or murine plasma kallikrein).

[0437] In some embodiments, the heavy chain immunoglobulin variable domain sequence comprises the heavy chain variable domain of a protein described herein, and/or the light chain immunoglobulin variable domain sequence comprises the light chain variable domain of a protein described herein.

[0438] In some embodiments, the protein comprises the heavy chain of a protein described herein, and/or the light chain of a protein described herein.

[0439] In some aspects, the disclosure features a method of treating or preventing restenosis (e.g., after angioplasty) in a subject, the method comprising:

[0440] administering an isolated protein (e.g., antibody, e.g., human antibody) comprising a heavy chain immunoglobulin variable domain sequence and a light chain immunoglobulin variable domain sequence to the subject, wherein:

[0441] the heavy chain immunoglobulin variable domain sequence comprises one, two, or three (e.g., three) CDR regions from the heavy chain variable domain of a protein described herein, and/or

[0442] the light chain immunoglobulin variable domain sequence comprises one, two, or three (e.g., three) CDR regions from the light chain variable domain of a protein described herein,

[0443] wherein the protein binds to plasma kallikrein.

[0444] In some embodiments, the plasma kallikrein binding protein does not bind prekallikrein (e.g., human prekallikrein and/or murine prekallikrein), but binds to the active form of plasma kallikrein (e.g., human plasma kallikrein and/or murine plasma kallikrein).

[0445] In some embodiments, the protein is administered in combination with another treatment for restenosis (e.g., after angioplasty).

[0446] In some embodiments, the protein inhibits plasma kallikrein (e.g., human plasma kallikrein and/or murine plasma kallikrein).

[0447] In some embodiments, the heavy chain immunoglobulin variable domain sequence comprises the heavy chain variable domain of a protein described herein, and/or the light chain immunoglobulin variable domain sequence comprises the light chain variable domain of a protein described herein.

[0448] In some embodiments, the protein comprises the heavy chain of a protein described herein, and/or the light chain of a protein described herein.

[0449] In some aspects, the disclosure features a method of treating or preventing systemic lupus erythematosis nephritis in a subject, the method comprising:

[0450] administering an isolated protein (e.g., antibody, e.g., human antibody) comprising a heavy chain immunoglobulin variable domain sequence and a light chain immunoglobulin variable domain sequence to the subject, wherein:

[0451] the heavy chain immunoglobulin variable domain sequence comprises one, two, or three (e.g., three) CDR regions from the heavy chain variable domain of a protein described herein, and/or

[0452] the light chain immunoglobulin variable domain sequence comprises one, two, or three (e.g., three) CDR regions from the light chain variable domain of a protein described herein,

[0453] wherein the protein binds to plasma kallikrein.

[0454] In some embodiments, the plasma kallikrein binding protein does not bind prekallikrein (e.g., human prekallikrein and/or murine prekallikrein), but binds to the active form of plasma kallikrein (e.g., human plasma kallikrein and/or murine plasma kallikrein).

[0455] In some embodiments, the protein is administered in combination with another treatment for systemic lupus erythematosis nephritis.

[0456] In some embodiments, the protein inhibits plasma kallikrein (e.g., human plasma kallikrein and/or murine plasma kallikrein).

[0457] In some embodiments, the heavy chain immunoglobulin variable domain sequence comprises the heavy chain variable domain of a protein described herein, and/or the light chain immunoglobulin variable domain sequence comprises the light chain variable domain of a protein described herein.

[0458] In some embodiments, the protein comprises the heavy chain of a protein described herein, and/or the light chain of a protein described herein.

[0459] In some aspects, the disclosure features a method of treating or preventing burn injury in a subject, the method comprising:

[0460] administering an isolated protein (e.g., antibody, e.g., human antibody) comprising a heavy chain immunoglobulin variable domain sequence and a light chain immunoglobulin variable domain sequence to the subject, wherein:

[0461] the heavy chain immunoglobulin variable domain sequence comprises one, two, or three (e.g., three) CDR regions from the heavy chain variable domain of a protein described herein, and/or

[0462] the light chain immunoglobulin variable domain sequence comprises one, two, or three (e.g., three) CDR regions from the light chain variable domain of a protein described herein,

[0463] wherein the protein binds to plasma kallikrein.

[0464] In some embodiments, the plasma kallikrein binding protein does not bind prekallikrein (e.g., human prekallikrein and/or murine prekallikrein), but binds to the active form of plasma kallikrein (e.g., human plasma kallikrein and/or murine plasma kallikrein).

[0465] In some embodiments, the protein is administered in combination with another treatment for burn injury.

[0466] In some embodiments, the protein inhibits plasma kallikrein (e.g., human plasma kallikrein and/or murine plasma kallikrein).

[0467] In some embodiments, the heavy chain immunoglobulin variable domain sequence comprises the heavy chain variable domain of a protein described herein, and/or the light chain immunoglobulin variable domain sequence comprises the light chain variable domain of a protein described herein.

[0468] In some embodiments, the protein comprises the heavy chain of a protein described herein, and/or the light chain of a protein described herein.

[0469] In some aspects, the disclosure features a method of detecting plasma kallikrein in a sample, the method comprising: contacting the sample with a plasma kallikrein binding protein (e.g., a plasma kallikrein binding protein described herein); and detecting an interaction between the protein and the plasma kallikrein, if present.

[0470] In some embodiments, the protein includes a detectable label.

[0471] In some embodiments, the plasma kallikrein binding protein does not bind prekallikrein (e.g., human prekallikrein and/or murine prekallikrein), but binds to the active form of plasma kallikrein (e.g., human plasma kallikrein and/or murine plasma kallikrein). In some embodiments, the plasma kallikrein binding protein binds prekallikrein (e.g., human prekallikrein and/or murine prekallikrein) and the active form of plasma kallikrein (e.g., human plasma kallikrein and/or murine plasma kallikrein).

[0472] In some aspects, the disclosure features a method of detecting plasma kallikrein in a subject, the method comprising: administering a plasma kallikrein binding protein (e.g., a plasma kallikrein binding protein described herein) to a subject; and detecting an interaction between the protein and the plasma kallikrein in the subject, if present. For example, the detecting comprises imaging the subject.

[0473] In some embodiments, the protein further includes a detectable label.

[0474] In some embodiments, the plasma kallikrein binding protein does not bind prekallikrein (e.g., human prekallikrein and/or murine prekallikrein), but binds to the active form of plasma kallikrein (e.g., human plasma kallikrein and/or murine plasma kallikrein). In some embodiments, the plasma kallikrein binding protein binds prekallikrein (e.g., human prekallikrein and/or murine prekallikrein) and the active form of plasma kallikrein (e.g., human plasma kallikrein and/or murine plasma kallikrein).

[0475] In some aspects, the disclosure features a method of modulating plasma kallikrein activity, e.g., in a method of treating or preventing a plasma kallikrein associated disorder. The method includes: contacting plasma kallikrein with a plasma kallikrein binding protein (e.g., a plasma kallikrein binding protein described herein) (e.g., in a human subject), thereby modulating plasma kallikrein activity.

[0476] In some embodiments, the plasma kallikrein binding protein does not bind prekallikrein (e.g., human prekallikrein and/or murine prekallikrein), but binds to the active form of plasma kallikrein (e.g., human plasma kallikrein and/or murine plasma kallikrein).

[0477] In some embodiments, the plasma kallikrein associated disorder is selected from the group consisting of rheumatoid arthritis, gout, intestinal bowel disease, oral mucositis, neuropathic pain, inflammatory pain, spinal stenosis-degenerative spine disease, arterial or venous thrombosis, post operative ileus, aortic aneurysm, osteoarthritis, vasculitis, edema, hereditary angioedema, cerebral edema, pulmonary embolism, stroke, clotting induced by ventricular assistance devices or stents, head trauma or peri-tumor brain edema, sepsis, acute middle cerebral artery (MCA) ischemic event (stroke), restenosis (e.g., after angioplasty), systemic lupus erythematosis nephritis/vasculitis, and burn injury.

[0478] In some embodiments, the plasma kallikrein binding protein reduces abberent clotting associated with the contact activation system (i.e., intrinsic activation system) by at least 10% as measured by e.g., an APTT clotting assay. In other embodiments, the plasma kallikrein binding protein reduces abberent clotting associated with the contact activation system by at least 20%, at least 30%, at least 40%, at least 50%, at least 60%, at least 70%, at least 80%, at least 90%, at least 95%, at least 99%, or even 100% (i.e., no detectable abberent clotting).

[0479] In some aspects, the disclosure features a method of treating a plasma kallikrein associated disorder, the method comprising administering, to a subject, a plasma kallikrein binding protein (e.g., a plasma kallikrein binding protein described herein) in an amount sufficient to treat a plasma kallikrein associated disorder in the subject. The method can further include providing to the subject a second therapy that is therapy for the plasma kallikrein associated disorder, e.g., as described herein.

[0480] In some embodiments, the plasma kallikrein associated disorder is selected from the group consisting of rheumatoid arthritis, gout, intestinal bowel disease, oral mucositis, neuropathic pain, inflammatory pain, spinal stenosis-degenerative spine disease, arterial or venous thrombosis, post operative ileus, aortic aneurysm, osteoarthritis, vasculitis, edema, hereditary angioedema, cerebral edema, pulmonary embolism, stroke, clotting induced by ventricular assistance devices or stents, head trauma or peri-tumor brain edema, sepsis, acute middle cerebral artery (MCA) ischemic event (stroke), restenosis (e.g., after angioplasty), systemic lupus erythematosis nephritis/vasculitis, and burn injury.

[0481] In some aspects, the disclosure features a method of imaging a subject. The method includes administering a plasma kallikrein binding protein (e.g., a plasma kallikrein binding protein described herein) to the subject, and e.g., detecting an interaction between the protein and the plasma kallikrein in the subject, if present.

[0482] In some embodiments, the plasma kallikrein binding protein does not bind prekallikrein (e.g., human prekallikrein and/or murine prekallikrein), but binds to the active form of plasma kallikrein (e.g., human plasma kallikrein and/or murine plasma kallikrein). In some embodiments, the plasma kallikrein binding protein binds prekallikrein (e.g., human prekallikrein and/or murine prekallikrein) and the active form of plasma kallikrein (e.g., human plasma kallikrein and/or murine plasma kallikrein).

[0483] In some embodiments, the protein does not inhibit plasma kallikrein activity.

[0484] In some embodiments, the protein inhibits plasma kallikrein activity (e.g., human plasma kallikrein and/or murine plasma kallikrein).

[0485] In some embodiments, the plasma kallikrein binding protein may include a detectable label (e.g., a radionuclide or an MRI-detectable label).

[0486] In some embodiments, the subject has or is suspected of having a plasma kallikrein associated disorder. The method is useful, e.g., for diagnosis of a plasma kallikrein associated disorder.

[0487] In some embodiments, the plasma kallikrein associated disorder is selected from the group consisting of rheumatoid arthritis, gout, intestinal bowel disease, oral mucositis, neuropathic pain, inflammatory pain, spinal stenosis-degenerative spine disease, arterial or venous thrombosis, post operative ileus, aortic aneurysm, osteoarthritis, vasculitis, edema, hereditary angioedema, cerebral edema, pulmonary embolism, stroke, clotting induced by ventricular assistance devices or stents, head trauma or peri-tumor brain edema, sepsis, acute middle cerebral artery (MCA) ischemic event (stroke), restenosis (e.g., after angioplasty), systemic lupus erythematosis nephritis, and burn injury.

[0488] In some embodiments, the plasma kallikrein binding protein reduces abberent clotting associated with the contact activation system (i.e., intrinsic activation system) by at least 10% as measured by e.g., an APTT clotting assay (e.g., by at least 20%, at least 30%, at least 40%, at least 50%, at least 60%, at least 70%, at least 80%, at least 90%, at least 95%, at least 99%, or even 100% (i.e., no detectable abberent clotting)).

[0489] In some aspects, the disclosure features a method of imaging plasma kallikrein, e.g., in a subject or sample (e.g., biopsy sample). The method includes administering a plasma kallikrein binding protein (e.g., a plasma kallikrein binding protein described herein), e.g., to the subject or the sample, and detecting an interaction between the protein and the plasma kallikrein, if present.

[0490] In some embodiments, the plasma kallikrein binding protein does not bind prekallikrein (e.g., human prekallikrein and/or murine prekallikrein), but binds to the active form of plasma kallikrein (e.g., human plasma kallikrein and/or murine plasma kallikrein). In some embodiments, the plasma kallikrein binding protein binds prekallikrein (e.g., human prekallikrein and/or murine prekallikrein) and the active form of plasma kallikrein (e.g., human plasma kallikrein and/or murine plasma kallikrein).

[0491] In some embodiments, the protein does not inhibit plasma kallikrein activity.

[0492] In some embodiments, the protein inhibits plasma kallikrein activity (e.g., human plasma kallikrein and/or murine plasma kallikrein).

[0493] In some embodiments, the plasma kallikrein binding protein may include a detectable label (e.g., a radionuclide or an MRI-detectable label).

[0494] In some embodiments, the subject has or is suspected of having a plasma kallikrein associated disorder. The method is useful, e.g., for diagnosis of a plasma kallikrein associated disorder.

[0495] In some embodiments, the plasma kallikrein associated disorder is selected from the group consisting of rheumatoid arthritis, gout, intestinal bowel disease, oral mucositis, neuropathic pain, inflammatory pain, spinal stenosis-degenerative spine disease, arterial or venous thrombosis, post operative ileus, aortic aneurysm, osteoarthritis, vasculitis, edema, hereditary angioedema, cerebral edema, pulmonary embolism, stroke, clotting induced by ventricular assistance devices or stents, head trauma or peri-tumor brain edema, sepsis, acute middle cerebral artery (MCA) ischemic event (stroke), restenosis (e.g., after angioplasty), systemic lupus erythematosis nephritis, and burn injury.

[0496] In some embodiments, the plasma kallikrein binding protein reduces abberent clotting associated with the contact activation system (i.e., intrinsic activation system) by at least 10% as measured by e.g., an APTT clotting assay (e.g., by at least 20%, at least 30%, at least 40%, at least 50%, at least 60%, at least 70%, at least 80%, at least 90%, at least 95%, at least 99%, or even 100% (i.e., no detectable abberent clotting)).

[0497] In one aspect, the disclosure features the use of a plasma kallikrein binding protein described herein for the treatment of a disorder described herein, e.g., rheumatoid arthritis, gout, intestinal bowel disease, oral mucositis, neuropathic pain, inflammatory pain, spinal stenosis-degenerative spine disease, arterial or venous thrombosis, post operative ileus, aortic aneurysm, osteoarthritis, vasculitis, edema, hereditary angioedema, cerebral edema, pulmonary embolism, stroke, clotting induced by ventricular assistance devices or stents, head trauma or peri-tumor brain edema, sepsis, acute middle cerebral artery (MCA) ischemic event (stroke), restenosis (e.g., after angioplasty), systemic lupus erythematosis nephritis, or burn injury; or to promote wound healing.

[0498] In some embodiments, the plasma kallikrein binding protein does not bind prekallikrein (e.g., human prekallikrein and/or murine prekallikrein), but binds to the active form of plasma kallikrein (e.g., human plasma kallikrein and/or murine plasma kallikrein). In some embodiments, the plasma kallikrein binding protein binds prekallikrein (e.g., human prekallikrein and/or murine prekallikrein) and the active form of plasma kallikrein (e.g., human plasma kallikrein and/or murine plasma kallikrein).

[0499] In one aspect, the disclosure features the use of a plasma kallikrein binding protein described herein for the manufacture of a medicament for the treatment of a disorder described herein, e.g., rheumatoid arthritis, gout, intestinal bowel disease, oral mucositis, neuropathic pain, inflammatory pain, spinal stenosis-degenerative spine disease, arterial or venous thrombosis, post operative ileus, aortic aneurysm, osteoarthritis, vasculitis, edema, hereditary angioedema, cerebral edema, pulmonary embolism, stroke, clotting induced by ventricular assistance devices or stents, head trauma or peri-tumor brain edema, sepsis, acute middle cerebral artery (MCA) ischemic event (stroke), restenosis (e.g., after angioplasty), systemic lupus erythematosis nephritis, or burn injury; or for the manufacture of a medicament for wound healing.

[0500] In some embodiments, the plasma kallikrein binding protein reduces abberent clotting associated with the contact activation system (i.e., intrinsic activation system) by at least 10% as measured by e.g., an APTT clotting assay (e.g., by at least 20%, at least 30%, at least 40%, at least 50%, at least 60%, at least 70%, at least 80%, at least 90%, at least 95%, at least 99%, or even 100% (i.e., no detectable abberent clotting)).

[0501] In some embodiments, the plasma kallikrein binding protein does not bind prekallikrein (e.g., human prekallikrein and/or murine prekallikrein), but binds to the active form of plasma kallikrein (e.g., human plasma kallikrein and/or murine plasma kallikrein).

[0502] The details of one or more embodiments of the invention are set forth in the accompanying drawings and the description below. Other features, objects, and advantages of the invention will be apparent from the description and drawings, and from the claims.

[0503] The contents of all cited references including literature references, issued patents, published or non-published patent applications cited throughout this application as well as those listed below are hereby expressly incorporated by reference in their entireties. In case of conflict, the present application, including any definitions herein, will control.

### BRIEF DESCRIPTION OF DRAWINGS

[0504] FIG. 1 is a schematic representation of the role of plasma kallikrein (pKal) in intrinsic coagulation pathway and inflammation.

[0505] FIG. 2 depicts the effect of M162-A04 on carrageenan-induced rat paw edema. Paw swelling was measured by water displacement.

[0506] FIG. 3 depicts the effect of M162-A04 on carrageenan-induced thermal hyperalgesia. Pain latency was measured by the Hargreaves method after carrageenan injection.

[0507] FIG. 4 depicts the alignment of the light chain DNA sequence of nongermlined (X63-G06) and germlined, codon optimized (X81-B01) versions of the same antibody discovered using ROLIC affinity maturation. Positions indicated with an asterisk (*) are conserved, whereas blank spaces correspond to bases changed in X81-B01 due to either codon optimization or germlining.

[0508] FIG. 5 depicts the alignment of the light chain amino acid sequence of nongermlined (X63-G06) and germlined, codon optimized (X81-B01) versions of the same antibody discovered using ROLIC affinity maturation. Positions indicated with an asterisk (*) are conserved, whereas blank spaces correspond to amino acids changed in X81-B01 due to germlining. A total of 11 amino acids differ between the nongermlined (X63-G06) and germlined, codon optimized antibody (X81-B01).

[0509] FIG. 6 depicts the alignment of the heavy chain DNA sequence of nongermlined (X63-G06) and germlined, codon optimized (X81-B01) versions of the same antibody discovered using ROLIC affinity maturation. Positions indicated with an asterisk (*) are conserved, whereas blank spaces correspond to DNA bases changed in X81-B01 due to codon optimization.

[0510] FIG. 7 depicts the alignment of the heavy chain amino acid sequence of nongermlined (X63-G06) and germlined, codon optimized (X81-B01) versions of the same antibody discovered using ROLIC affinity maturation. Positions indicated with an asterisk (*) are conserved. The two antibodies have the same amino acid sequence in the heavy chain.

[0511] FIG. 8A depicts the EPI-KAL2 competition for X81-B01 binding pKal. X81-B01 (IgG) was captured on an anti-human Fc fragment specific surface of a CM5 BIACORE® chip. pKal (100 nM) was flowed over the surface in the presence (lower sensorgram in the figure) or absence of 1 μM EPI-KAL2 (upper sensorgram in the figure).

[0512] FIG. 8B depicts the EPI-KAL2 competition for X67-D03 binding pKal. X67-D03 (IgG) was captured on an anti-human Fc fragment specific surface of a CM5 Biacore chip. pKal (100 nM) was flowed over the surface in the presence (lower sensorgram in the figure) or absence of 1 μM EPI-KAL2 (upper sensorgram in the figure).

[0513] FIG. 9 depicts the results of CLIPS epitope mapping for antibodies listed in Table 12.

[0514] FIGS. 10A-10C depict ClustalW alignment of pKal sequences from different species. Positions indicated by a “*” are conserved positions between, whereas positions indicated “:” indicate conservative substitutions between species. Positions indicated by a “.” have nonconservative substitutions in some species. Stretches of amino acids indicated by the symbol “@” were shown to be highly solvent exposed by solvent accessible surface area calculation. Stretches of amino acids indicated by a “+” were identified as potential epitopes of antibodies listed in Table 12. Amino acids highlighted in grey were found by solvent accessible surface area calculation to be buried when complexed with a Kunitz domain active site inhibitor. The underlined positions are the amino acids that form the catalytic triad (His434, Asp483, and Ser578, numbering based on the human sequence).

[0515] FIGS. 11A and 11B depict a Biacore competition analysis with epi-kal2, as described herein in Example 12, for (i) DX-2922, and (ii) M6-D09 antibodies.

[0516] FIG. 12 depicts a Biacore competition analysis with AEBSF, as described herein in Example 12, for (i) DX-2911, and (ii) M6-D09 antibodies.

[0517] FIG. 13 depicts a Biocore analysis showing that DX-2922 binds to plasma kallikrein that bound to high molecular weight kininogen (HMWK).

[0518] FIG. 14 depicts a graph showing dose dependent inhibition of edema by X101-A01 in carrageenan-induced paw edema (CPE) in rats.

### DETAILED DESCRIPTION

### Definitions

[0519] For convenience, before further description of the present invention, certain terms employed in the specification, examples and appended claims are defined here. Other terms are defined as they appear in the specification.

[0520] The singular forms “a”, “an”, and “the” include plural references unless the context clearly dictates otherwise.

[0521] The term “agonist,” as used herein, is meant to refer to an agent that mimics or up-regulates (e.g., potentiates or supplements) the bioactivity of a protein. An agonist can be a wild-type protein or derivative thereof having at least one bioactivity of the wild-type protein. An agonist can also be a compound which increases at least one bioactivity of a protein. An agonist can also be a compound which increases the interaction of a polypeptide with another molecule, e.g., a target peptide or nucleic acid.

[0522] “Antagonist” as used herein is meant to refer to an agent that downregulates (e.g., suppresses or inhibits) at least one bioactivity of a protein. An antagonist can be a compound which inhibits or decreases the interaction between a protein and another molecule, e.g., a target peptide or enzyme substrate. An antagonist can also be a compound which reduces the amount of expressed protein present.

[0523] The term “antibody” refers to a protein that includes at least one immunoglobulin variable domain (variable region) or immunoglobulin variable domain (variable region) sequence. For example, an antibody can include a heavy (H) chain variable region (abbreviated herein as VH or HV), and a light (L) chain variable region (abbreviated herein as VL or LV). In another example, an antibody includes two heavy (H) chain variable regions and two light (L) chain variable regions. The term “antibody” encompasses antigen-binding fragments of antibodies (e.g., single chain antibodies, Fab and sFab fragments, F(ab′)₂, Fd fragments, Fv fragments, scFv, and domain antibodies (dAb) fragments (de Wildt et al., Eur J. Immunol. 1996; 26(3):629-39)) as well as complete antibodies. An antibody can have the structural features of IgA, IgG, IgE, IgD, IgM (as well as subtypes thereof). Antibodies may be from any source, but primate (human and non-human primate) and primatized are preferred.

[0524] The VH and VL regions can be further subdivided into regions of hypervariability, termed “complementarity determining regions” (“CDRs”), interspersed with regions that are more conserved, termed “framework regions” (“FRs”). The extent of the framework region and CDRs have been defined (see, Kabat, E. A., et al. (1991) Sequences of Proteins of Immunological Interest, Fifth Edition, U.S. Department of Health and Human Services, NIH Publication No. 91-3242, and Chothia, C. et al. (1987) J. Mol. Biol. 196:901-917). Kabat definitions are used herein. Each VH and VL is typically composed of three CDRs and four FRs, arranged from amino-terminus to carboxy-terminus in the following order: FR1, CDR1, FR2, CDR2, FR3, CDR3, FR4.

[0525] As used herein, an “immunoglobulin variable domain sequence” refers to an amino acid sequence which can form the structure of an immunoglobulin variable domain such that one or more CDR regions are positioned in a conformation suitable for an antigen binding site. For example, the sequence may include all or part of the amino acid sequence of a naturally-occurring variable domain. For example, the sequence may omit one, two or more N- or C-terminal amino acids, internal amino acids, may include one or more insertions or additional terminal amino acids, or may include other alterations. In one embodiment, a polypeptide that includes immunoglobulin variable domain sequence can associate with another immunoglobulin variable domain sequence to form an antigen binding site, e.g., a structure that preferentially interacts with plasma kallikrein.

[0526] The VH or VL chain of the antibody can further include all or part of a heavy or light chain constant region, to thereby form a heavy or light immunoglobulin chain, respectively. In one embodiment, the antibody is a tetramer of two heavy immunoglobulin chains and two light immunoglobulin chains, wherein the heavy and light immunoglobulin chains are inter-connected by, e.g., disulfide bonds. In IgGs, the heavy chain constant region includes three immunoglobulin domains, CH1, CH2 and CH3. The light chain constant region includes a CL domain. The variable region of the heavy and light chains contains a binding domain that interacts with an antigen. The constant regions of the antibodies typically mediate the binding of the antibody to host tissues or factors, including various cells of the immune system (e.g., effector cells) and the first component (Clq) of the classical complement system. The light chains of the immunoglobulin may be of types kappa or lambda. In one embodiment, the antibody is glycosylated. An antibody can be functional for antibody-dependent cytotoxicity and/or complement-mediated cytotoxicity.

[0527] One or more regions of an antibody can be human or effectively human. For example, one or more of the variable regions can be human or effectively human. For example, one or more of the CDRs can be human, e.g., HC CDR1, HC CDR2, HC CDR3, LC CDR1, LC CDR2, and/or LC CDR3. Each of the light chain (LC) and/or heavy chain (HC) CDRs can be human. HC CDR3 can be human. One or more of the framework regions can be human, e.g., FR1, FR2, FR3, and/or FR4 of the HC and/or LC. For example, the Fc region can be human. In one embodiment, all the framework regions are human, e.g., derived from a human somatic cell, e.g., a hematopoietic cell that produces immunoglobulins or a non-hematopoietic cell. In one embodiment, the human sequences are germline sequences, e.g., encoded by a germline nucleic acid. In one embodiment, the framework (FR) residues of a selected Fab can be converted to the amino-acid type of the corresponding residue in the most similar primate germline gene, especially the human germline gene. One or more of the constant regions can be human or effectively human. For example, at least 70, 75, 80, 85, 90, 92, 95, 98, or 100% of an immunoglobulin variable domain, the constant region, the constant domains (CH1, CH2, CH3, and/or CL1), or the entire antibody can be human or effectively human.

[0528] All or part of an antibody can be encoded by an immunoglobulin gene or a segment thereof. Exemplary human immunoglobulin genes include the kappa, lambda, alpha (IgA1 and IgA2), gamma (IgG1, IgG2, IgG3, IgG4), delta, epsilon and mu constant region genes, as well as the many immunoglobulin variable region genes. Full-length immunoglobulin “light chains” (about 25 KDa or about 214 amino acids) are encoded by a variable region gene at the NH2-terminus (about 110 amino acids) and a kappa or lambda constant region gene at the COOH-terminus. Full-length immunoglobulin “heavy chains” (about 50 KDa or about 446 amino acids), are similarly encoded by a variable region gene (about 116 amino acids) and one of the other aforementioned constant region genes, e.g., gamma (encoding about 330 amino acids). The length of human HC varies considerably because HC CDR3 varies from about 3 amino-acid residues to over 35 amino-acid residues.

[0529] The term “antigen-binding fragment” of a full length antibody refers to one or more fragments of a full-length antibody that retain the ability to specifically bind to a target of interest. Examples of binding fragments encompassed within the term “antigen-binding fragment” of a full length antibody and that retain functionality include (i) a Fab fragment, a monovalent fragment consisting of the VL, VH, CL and CH1 domains; (ii) a F(ab′)₂ fragment, a bivalent fragment including two Fab fragments linked by a disulfide bridge at the hinge region; (iii) a Fd fragment consisting of the VH and CH1 domains; (iv) a Fv fragment consisting of the VL and VH domains of a single arm of an antibody, (v) a dAb fragment (Ward et al., (1989) Nature 341:544-546), which consists of a VH domain; and (vi) an isolated complementarity determining region (CDR). Furthermore, although the two domains of the Fv fragment, VL and VH, are coded for by separate genes, they can be joined, using recombinant methods, by a synthetic linker that enables them to be made as a single protein chain in which the VL and VH regions pair to form monovalent molecules known as single chain Fv (scFv). See e.g., U.S. Pat. Nos. 5,260,203, 4,946,778, and 4,881,175; Bird et al. (1988) Science 242:423-426; and Huston et al. (1988) Proc. Natl. Acad. Sci. USA 85:5879-5883.

[0530] Antibody fragments can be obtained using any appropriate technique including conventional techniques known to those with skill in the art. The term “monospecific antibody” refers to an antibody that displays a single binding specificity and affinity for a particular target, e.g., epitope. This term includes a “monoclonal antibody” or “monoclonal antibody composition,” which as used herein refers to a preparation of antibodies or fragments thereof of single molecular composition, irrespective of how the antibody was generated.

[0531] Antibodies are “germlined” by reverting one or more non-germline amino acids in framework regions to corresponding germline amino acids of the antibody, so long as binding properties are substantially retained.

[0532] The inhibition constant (Ki) provides a measure of inhibitor potency; it is the concentration of inhibitor required to reduce enzyme activity by half and is not dependent on enzyme or substrate concentrations. The apparent Ki (K_{i,app}) is obtained at different substrate concentrations by measuring the inhibitory effect of different concentrations of inhibitor (e.g., inhibitory binding protein) on the extent of the reaction (e.g., enzyme activity); fitting the change in pseudo-first order rate constant as a function of inhibitor concentration to the Morrison equation (Equation 1) yields an estimate of the apparent Ki value. The Ki is obtained from the y-intercept extracted from a linear regression analysis of a plot of Ki,app versus substrate concentration.

$$v = {v}_{o} - {v}_{o} ( \frac{( {K}_{i , app} + I + E ) - \sqrt{{( {K}_{i , app} + I + E )}^{2} - 4 \cdot I \cdot E}}{2 \cdot E} ) \qquad Equation 1$$

[0533] Where v=measured velocity; v₀=velocity in the absence of inhibitor; K_{i,app}=apparent inhibition constant; I=total inhibitor concentration; and E=total enzyme concentration.

[0534] As used herein, “binding affinity” refers to the apparent association constant or K_{A}. The K_{A} is the reciprocal of the dissociation constant (K_{D}). A binding protein may, for example, have a binding affinity of at least 10⁵, 10⁶, 10⁷, 10⁸, 10⁹, 10¹⁰ and 10¹¹ M⁻¹ for a particular target molecule, e.g., plasma kallikrein. Higher affinity binding of a binding protein to a first target relative to a second target can be indicated by a higher K_{A} (or a smaller numerical value K_{D}) for binding the first target than the K_{A} (or numerical value K_{D}) for binding the second target. In such cases, the binding protein has specificity for the first target (e.g., a protein in a first conformation or mimic thereof) relative to the second target (e.g., the same protein in a second conformation or mimic thereof; or a second protein). Differences in binding affinity (e.g., for specificity or other comparisons) can be at least 1.5, 2, 3, 4, 5, 10, 15, 20, 37.5, 50, 70, 80, 91, 100, 500, 1000, 10,000 or 10⁵ fold.

[0535] Binding affinity can be determined by a variety of methods including equilibrium dialysis, equilibrium binding, gel filtration, ELISA, surface plasmon resonance, or spectroscopy (e.g., using a fluorescence assay). Exemplary conditions for evaluating binding affinity are in HBS-P buffer (10 mM HEPES pH7.4, 150 mM NaCl, 0.005% (v/v) Surfactant P20). These techniques can be used to measure the concentration of bound and free binding protein as a function of binding protein (or target) concentration. The concentration of bound binding protein ([Bound]) is related to the concentration of free binding protein ([Free]) and the concentration of binding sites for the binding protein on the target where (N) is the number of binding sites per target molecule by the following equation:

[Bound]=N·[Free]/((1/K_{A})+[Free]).

[0536] It is not always necessary to make an exact determination of K_{A}, though, since sometimes it is sufficient to obtain a quantitative measurement of affinity, e.g., determined using a method such as ELISA or FACS analysis, is proportional to K_{A}, and thus can be used for comparisons, such as determining whether a higher affinity is, e.g., 2-fold higher, to obtain a qualitative measurement of affinity, or to obtain an inference of affinity, e.g., by activity in a functional assay, e.g., an in vitro or in vivo assay.

[0537] The term “binding protein” refers to a protein that can interact with a target molecule. This term is used interchangeably with “ligand.” A “plasma kallikrein binding protein” refers to a protein that can interact with (e.g., bind) plasma kallikrein, and includes, in particular, proteins that preferentially or specifically interact with and/or inhibit plasma kallikrein. A protein inhibits plasma kallikrein if it causes a decrease in the activity of plasma kallikrein as compared to the activity of plasma kallikrein in the absence of the protein and under the same conditions. In some embodiments, the plasma kallikrein binding protein is an antibody.

[0538] A “conservative amino acid substitution” is one in which the amino acid residue is replaced with an amino acid residue having a similar side chain. Families of amino acid residues having similar side chains have been defined in the art. These families include amino acids with basic side chains (e.g., lysine, arginine, histidine), acidic side chains (e.g., aspartic acid, glutamic acid), uncharged polar side chains (e.g., glycine, asparagine, glutamine, serine, threonine, tyrosine, cysteine), nonpolar side chains (e.g., alanine, valine, leucine, isoleucine, proline, phenylalanine, methionine, tryptophan), beta-branched side chains (e.g., threonine, valine, isoleucine) and aromatic side chains (e.g., tyrosine, phenylalanine, tryptophan, histidine).

[0539] It is possible for one or more framework and/or CDR amino acid residues of a binding protein to include one or more mutations (e.g., substitutions (e.g., conservative substitutions or substitutions of non-essential amino acids), insertions, or deletions) relative to a binding protein described herein. A plasma kallikrein binding protein may have mutations (e.g., substitutions (e.g., conservative substitutions or substitutions of non-essential amino acids), insertions, or deletions) (e.g., at least one, two, three, or four, and/or less than 15, 12, 10, 9, 8, 7, 6, 5, 4, 3, or 2 mutations) relative to a binding protein described herein, e.g., mutations which do not have a substantial effect on protein function. The mutations can be present in framework regions, CDRs, and/or constant regions. In some embodiments, the mutations are present in a framework region. In some embodiments, the mutations are present in a CDR. In some embodiments, the mutations are present in a constant region. Whether or not a particular substitution will be tolerated, i.e., will not adversely affect biological properties, such as binding activity, can be predicted, e.g., by evaluating whether the mutation is conservative or by the method of Bowie, et al. (1990) Science 247:1306-1310.

[0540] Motif sequences for biopolymers can include positions which can be varied amino acids. For example, the symbol “X” in such a context generally refers to any amino acid (e.g., any of the twenty natural amino acids) unless otherwise specified, e.g., to refer to any non-cysteine amino acid. Other allowed amino acids can also be indicated for example, using parentheses and slashes. For example, “(A/W/F/N/Q)” means that alanine, tryptophan, phenylalanine, asparagine, and glutamine are allowed at that particular position.

[0541] An “effectively human” immunoglobulin variable region is an immunoglobulin variable region that includes a sufficient number of human framework amino acid positions such that the immunoglobulin variable region does not elicit an immunogenic response in a normal human. An “effectively human” antibody is an antibody that includes a sufficient number of human amino acid positions such that the antibody does not elicit an immunogenic response in a normal human.

[0542] An “epitope” refers to the site on a target compound that is bound by a binding protein (e.g., an antibody such as a Fab or full length antibody). In the case where the target compound is a protein, the site can be entirely composed of amino acid components, entirely composed of chemical modifications of amino acids of the protein (e.g., glycosyl moieties), or composed of combinations thereof. Overlapping epitopes include at least one common amino acid residue, glycosyl group, phosphate group, sulfate group, or other molecular feature.

[0543] A first binding protein (e.g., antibody) “binds to the same epitope” as a second binding protein (e.g., antibody) if the first binding protein binds to the same site on a target compound that the second binding protein binds, or binds to a site that overlaps (e.g., 50%, 60%, 70%, 80%, 90%, or 100% overlap, e.g., in terms of amino acid sequence or other molecular feature (e.g., glycosyl group, phosphate group, or sulfate group)) with the site that the second binding protein binds.

[0544] A first binding protein (e.g., antibody) “competes for binding” with a second binding protein (e.g., antibody) if the binding of the first binding protein to its epitope decreases (e.g., by 10%, 20%, 30%, 40%, 50%, 60%, 70%, 80%, 90%, 100%, or more) the amount of the second binding protein that binds to its epitope. The competition can be direct (e.g., the first binding protein binds to an epitope that is the same as, or overlaps with, the epitope bound by the second binding protein), or indirect (e.g., the binding of the first binding protein to its epitope causes a steric change in the target compound that decreases the ability of the second binding protein to bind to its epitope).

[0545] Calculations of “homology” or “sequence identity” between two sequences (the terms are used interchangeably herein) are performed as follows. The sequences are aligned for optimal comparison purposes (e.g., gaps can be introduced in one or both of a first and a second amino acid or nucleic acid sequence for optimal alignment and non-homologous sequences can be disregarded for comparison purposes). The optimal alignment is determined as the best score using the GAP program in the GCG software package with a Blossum 62 scoring matrix with a gap penalty of 12, a gap extend penalty of 4, and a frameshift gap penalty of 5. The amino acid residues or nucleotides at corresponding amino acid positions or nucleotide positions are then compared. When a position in the first sequence is occupied by the same amino acid residue or nucleotide as the corresponding position in the second sequence, then the molecules are identical at that position (as used herein amino acid or nucleic acid “identity” is equivalent to amino acid or nucleic acid “homology”). The percent identity between the two sequences is a function of the number of identical positions shared by the sequences.

[0546] In a preferred embodiment, the length of a reference sequence aligned for comparison purposes is at least 30%, preferably at least 40%, more preferably at least 50%, even more preferably at least 60%, and even more preferably at least 70%, 80%, 90%, 92%, 95%, 97%, 98%, or 100% of the length of the reference sequence. For example, the reference sequence may be the length of the immunoglobulin variable domain sequence.

[0547] A “humanized” immunoglobulin variable region is an immunoglobulin variable region that is modified to include a sufficient number of human framework amino acid positions such that the immunoglobulin variable region does not elicit an immunogenic response in a normal human. Descriptions of “humanized” immunoglobulins include, for example, U.S. Pat. No. 6,407,213 and U.S. Pat. No. 5,693,762.

[0548] As used herein, the term “hybridizes under low stringency, medium stringency, high stringency, or very high stringency conditions” describes conditions for hybridization and washing. Guidance for performing hybridization reactions can be found in Current Protocols in Molecular Biology, John Wiley & Sons, N.Y. (1989), 6.3.1-6.3.6. Aqueous and nonaqueous methods are described in that reference and either can be used. Specific hybridization conditions referred to herein are as follows: (1) low stringency hybridization conditions in 6× sodium chloride/sodium citrate (SSC) at about 45° C., followed by two washes in 0.2×SSC, 0.1% SDS at least at 50° C. (the temperature of the washes can be increased to 55° C. for low stringency conditions); (2) medium stringency hybridization conditions in 6×SSC at about 45° C., followed by one or more washes in 0.2×SSC, 0.1% SDS at 60° C.; (3) high stringency hybridization conditions in 6×SSC at about 45° C., followed by one or more washes in 0.2×SSC, 0.1% SDS at 65° C.; and (4) very high stringency hybridization conditions are 0.5M sodium phosphate, 7% SDS at 65° C., followed by one or more washes at 0.2×SSC, 1% SDS at 65° C. Very high stringency conditions (4) are the preferred conditions and the ones that should be used unless otherwise specified. The disclosure includes nucleic acids that hybridize with low, medium, high, or very high stringency to a nucleic acid described herein or to a complement thereof, e.g., nucleic acids encoding a binding protein described herein. The nucleic acids can be the same length or within 30, 20, or 10% of the length of the reference nucleic acid. The nucleic acid can correspond to a region encoding an immunoglobulin variable domain sequence described herein.

[0549] An “isolated composition” refers to a composition that is removed from at least 90% of at least one component of a natural sample from which the isolated composition can be obtained. Compositions produced artificially or naturally can be “compositions of at least” a certain degree of purity if the species or population of species of interest is at least 5, 10, 25, 50, 75, 80, 90, 92, 95, 98, or 99% pure on a weight-weight basis.

[0550] An “isolated” protein refers to a protein that is removed from at least 90% of at least one component of a natural sample from which the isolated protein can be obtained. Proteins can be “of at least” a certain degree of purity if the species or population of species of interest is at least 5, 10, 25, 50, 75, 80, 90, 92, 95, 98, or 99% pure on a weight-weight basis.

[0551] The term “modulator” refers to a polypeptide, nucleic acid, macromolecule, complex, molecule, small molecule, compound, species or the like (naturally-occurring or non-naturally-occurring), or an extract made from biological materials such as bacteria, plants, fungi, or animal cells or tissues, that may be capable of causing modulation. Modulators may be evaluated for potential activity as inhibitors or activators (directly or indirectly) of a functional property, biological activity or process, or combination of them, (e.g., agonist, partial antagonist, partial agonist, inverse agonist, antagonist, anti-microbial agents, inhibitors of microbial infection or proliferation, and the like) by inclusion in assays. In such assays, many modulators may be screened at one time. The activity of a modulator may be known, unknown or partially known.

[0552] A “non-essential” amino acid residue is a residue that can be altered from the wild-type sequence of the binding agent, e.g., the antibody, without abolishing or more preferably, without substantially altering a biological activity, whereas changing an “essential” amino acid residue results in a substantial loss of activity.

[0553] A “patient,” “subject” or “host” (these terms are used interchangeably) to be treated by the subject method may mean either a human or non-human animal.

[0554] The terms “prekallikrein” and “preplasma kallikrein” are used interchangeably herein and refer to the zymogen form of active plasma kallikrein, which is also known as prekallikrein.

[0555] The term “preventing” or to “prevent” a disease in a subject refers to subjecting the subject to a pharmaceutical treatment, e.g., the administration of a drug, such that at least one symptom of the disease is prevented, that is, administered prior to clinical manifestation of the unwanted condition (e.g., disease or other unwanted state of the host animal) so that it protects the host against developing the unwanted condition. “Preventing” a disease may also be referred to as “prophylaxis” or “prophylactic treatment.”

[0556] As used herein, the term “substantially identical” (or “substantially homologous”) is used herein to refer to a first amino acid or nucleic acid sequence that contains a sufficient number of identical or equivalent (e.g., with a similar side chain, e.g., conserved amino acid substitutions) amino acid residues or nucleotides to a second amino acid or nucleic acid sequence such that the first and second amino acid or nucleic acid sequences have (or encode proteins having) similar activities, e.g., a binding activity, a binding preference, or a biological activity. In the case of antibodies, the second antibody has the same specificity and has at least 50%, at least 25%, or at least 10% of the affinity relative to the same antigen.

[0557] Sequences similar or homologous (e.g., at least about 85% sequence identity) to the sequences disclosed herein are also part of this application. In some embodiments, the sequence identity can be about 85%, 90%, 91%, 92%, 93%, 94%, 95%, 96%, 97%, 98%, 99% or higher. In some embodiments, a plasma kallikrein binding protein can have about 85%, 90%, 91%, 92%, 93%, 94%, 95%, 96%, 97%, 98%, 99% or higher sequence identity to a binding protein described herein. In some embodiments, a plasma kallikrein binding protein can have about 85%, 90%, 91%, 92%, 93%, 94%, 95%, 96%, 97%, 98%, 99% or higher sequence identity in the HC and/or LC framework regions (e.g., HC and/or LC FR 1, 2, 3, and/or 4) to a binding protein described herein. In some embodiments, a plasma kallikrein binding protein can have about 85%, 90%, 91%, 92%, 93%, 94%, 95%, 96%, 97%, 98%, 99% or higher sequence identity in the HC and/or LC CDRs (e.g., HC and/or LC CDR1, 2, and/or 3) to a binding protein described herein. In some embodiments, a plasma kallikrein binding protein can have about 85%, 90%, 91%, 92%, 93%, 94%, 95%, 96%, 97%, 98%, 99% or higher sequence identity in the constant region (e.g., CH1, CH2, CH3, and/or CL1) to a binding protein described herein.

[0558] In addition, substantial identity exists when the nucleic acid segments hybridize under selective hybridization conditions (e.g., highly stringent hybridization conditions), to the complement of the strand. The nucleic acids may be present in whole cells, in a cell lysate, or in a partially purified or substantially pure form.

[0559] Statistical significance can be determined by any art known method. Exemplary statistical tests include: the Students T-test, Mann Whitney U non-parametric test, and Wilcoxon non-parametric statistical test. Some statistically significant relationships have a P value of less than 0.05 or 0.02. Particular binding proteins may show a difference, e.g., in specificity or binding that are statistically significant (e.g., P value <0.05 or 0.02). The terms “induce”, “inhibit”, “potentiate”, “elevate”, “increase”, “decrease” or the like, e.g., which denote distinguishable qualitative or quantitative differences between two states, may refer to a difference, e.g., a statistically significant difference, between the two states.

[0560] A “therapeutically effective dosage” preferably modulates a measurable parameter, e.g., plasma kallikrein activity, by a statistically significant degree or at least about 20%, more preferably by at least about 40%, even more preferably by at least about 60%, and still more preferably by at least about 80% relative to untreated subjects. The ability of a compound to modulate a measurable parameter, e.g., a disease-associated parameter, can be evaluated in an animal model system predictive of efficacy in human disorders and conditions, e.g., rheumatoid arthritis or oral mucositis. Alternatively, this property of a composition can be evaluated by examining the ability of the compound to modulate a parameter in vitro.

[0561] “Treating” a disease (or condition) in a subject or “treating” a subject having a disease refers to subjecting the subject to a pharmaceutical treatment, e.g., the administration of a drug, such that at least one symptom of the disease is cured, alleviated or decreased.

[0562] The term “preventing” a disease in a subject refers to subjecting the subject to a pharmaceutical treatment, e.g., the administration of a drug, such that at least one symptom of the disease is prevented, that is, administered prior to clinical manifestation of the unwanted condition (e.g., disease or other unwanted state of the host animal) so that it protects the host against developing the unwanted condition. “Preventing” a disease may also be referred to as “prophylaxis” or “prophylactic treatment.”

[0563] A “prophylactically effective amount” refers to an amount effective, at dosages and for periods of time necessary, to achieve the desired prophylactic result. Typically, because a prophylactic dose is used in subjects prior to or at an earlier stage of disease, the prophylactically effective amount will be less than the therapeutically effective amount.

[0564] As used herein the term “DX-2922” as used inchangeably with the term “X101-A01”. Other variants of this antibody are described below.

| Antibody | |
|---|---|
| Identification | Description |
| X63-G06 | Non-germlined Fab discovered using ROLIC, same HC |
| | but different LC as M160-G12 |
| X81-B01 | Germlined IgG produced in HEK 293T cells |
| X101-A01 | Germlined IgG produced in CHO cells, same HC and |
| | LC sequence as X81-B01 |
| DX-2922 | Alternate nomenclature for X101-A01 |

### Plasma Kallikrein Binding Proteins

[0565] Plasma kallikrein binding proteins can be full-length (e.g., an IgG (e.g., an IgG1, IgG2, IgG3, IgG4), IgM, IgA (e.g., IgA1, IgA2), IgD, and IgE) or can include only an antigen-binding fragment (e.g., a Fab, F(ab′)2 or scFv fragment. The binding protein can include two heavy chain immunoglobulins and two light chain immunoglobulins, or can be a single chain antibody. Plasma kallikrein binding proteins can be recombinant proteins such as humanized, CDR grafted, chimeric, deimmunized, or in vitro generated antibodies, and may optionally include constant regions derived from human germline immunoglobulin sequences. In one embodiment, the plasma kallikrein binding protein is a monoclonal antibody.

[0566] In one aspect, the disclosure features a protein (e.g., an isolated protein) that binds to plasma kallikrein (e.g., human plasma kallikrein and/or murine kallikrein) and includes at least one immunoglobulin variable region. For example, the protein includes a heavy chain (HC) immunoglobulin variable domain sequence and/or a light chain (LC) immunoglobulin variable domain sequence. In one embodiment, the protein binds to and inhibits plasma kallikrein, e.g., human plasma kallikrein and/or murine kallikrein.

[0567] The protein can include one or more of the following characteristics: (a) a human CDR or human framework region; (b) the HC immunoglobulin variable domain sequence comprises one or more (e.g., 1, 2, or 3) CDRs that are at least 85, 88, 89, 90, 91, 92, 93, 94, 95, 96, 97, 98, 99, or 100% identical to a CDR of a HC variable domain described herein; (c) the LC immunoglobulin variable domain sequence comprises one or more (e.g., 1, 2, or 3) CDRs that are at least 85, 88, 89, 90, 91, 92, 93, 94, 95, 96, 97, 98, 99, or 100% identical to a CDR of a LC variable domain described herein; (d) the LC immunoglobulin variable domain sequence is at least 85, 88, 89, 90, 91, 92, 93, 94, 95, 96, 97, 98, 99, or 100% identical to a LC variable domain described herein (e.g., overall or in framework regions or CDRs); (e) the HC immunoglobulin variable domain sequence is at least 85, 88, 89, 90, 91, 92, 93, 94, 95, 96, 97, 98, 99, or 100% identical to a HC variable domain described herein (e.g., overall or in framework regions or CDRs); (f) the protein binds an epitope bound by a protein described herein, or competes for binding with a protein described herein; (g) a primate CDR or primate framework region; (h) the HC immunoglobulin variable domain sequence comprises a CDR1 that differs by at least one amino acid but by no more than 2 or 3 amino acids from the CDR1 of a HC variable domain described herein; (i) the HC immunoglobulin variable domain sequence comprises a CDR2 that differs by at least one amino acid but by no more than 2, 3, 4, 5, 6, 7, or 8 amino acids from the CDR2 of a HC variable domain described herein; (j) the HC immunoglobulin variable domain sequence comprises a CDR3 that differs by at least one amino acid but by no more than 2, 3, 4, 5, or 6 amino acids from the CDR3 of a HC variable domain described herein; (k) the LC immunoglobulin variable domain sequence comprises a CDR1 that differs by at least one amino acid but by no more than 2, 3, 4, or 5 amino acids from the CDR1 of a LC variable domain described herein; (l) the LC immunoglobulin variable domain sequence comprises a CDR2 that differs by at least one amino acid but by no more than 2, 3, or 4 amino acids from the CDR2 of a LC variable domain described herein; (m) the LC immunoglobulin variable domain sequence comprises a CDR3 that differs by at least one amino acid but by no more than 2, 3, 4, or 5 amino acids from the CDR3 of a LC variable domain described herein; (n) the LC immunoglobulin variable domain sequence differs by at least one amino acid but by no more than 2, 3, 4, 5, 6, 7, 8, 9, or 10 amino acids from a LC variable domain described herein (e.g., overall or in framework regions or CDRs); and (o) the HC immunoglobulin variable domain sequence differs by at least one amino acid but by no more than 2, 3, 4, 5, 6, 7, 8, 9, or 10 amino acids from a HC variable domain described herein (e.g., overall or in framework regions or CDRs).

[0568] The plasma kallikrein binding protein may be an isolated protein (e.g., at least 70, 80, 90, 95, or 99% free of other proteins). In some embodiments, the plasma kallikrein binding protein, or composition thereof, is isolated from antibody cleavage fragments (e.g., cleaved DX-2922) that are inactive or partially active (e.g., bind plasma kallikrein with a Ki, app of 5000 nM or greater) compared to the plasma kallikrein binding protein. For example, the plasma kallikrein binding protein is at least 70% free of such antibody cleavage fragments; in other embodiments the binding protein is at least 80%, at least 90%, at least 95%, at least 99% or even 100% free from antibody cleavage fragments that are inactive or partially active.

[0569] The plasma kallikrein binding protein may additionally inhibit plasma kallikrein, e.g., human plasma kallikrein.

[0570] In some embodiments, the plasma kallikrein binding protein does not bind prekallikrein (e.g., human prekallikrein and/or murine prekallikrein), but binds to the active form of plasma kallikrein (e.g., human plasma kallikrein and/or murine kallikrein).

[0571] In certain embodiments, the protein binds at or near the active site of the catalytic domain of plasma kallikrein, or a fragment thereof, or binds an epitope that overlaps with the active site of plasma kallikrein.

[0572] In some aspects, the protein binds the same epitope or competes for binding with a protein described herein.

[0573] In some embodiments, the protein competes with or binds the same epitope as M162-A04, M160-G12, M142-H08, X63-G06, X101-A01, X81-B01, X67-D03, X67-G04, X115-B07, X115-D05, X115-E09, X115-H06, X115-A03, X115-D01, X115-F02, X115-G04, M29-D09, M145-D11, M06-D09 and M35-G04.

[0574] In some embodiments, the protein binds to (e.g., positions on plasma kallikrein corresponding to) CLIPS peptide C1, C2, C3, C4, C5, C6, or C7, or more than one of these peptides, e.g., the protein binds to C5 and C6. CLIPS peptides C1-C7 are peptides in plasma kallikrein identified by CLIPS epitope mapping (see FIGS. 9 and 10A-10C). C1 corresponds to positions 55-67 of the catalytic domain, C2 to positions 81-94, C3 to positions 101-108, C4 to positions 137-151, C5 to positions 162-178, C6 to positions 186-197, and C7 to positions 214-217 of plasma kallikrein.

[0575] In some embodiments, the protein binds to an epitope shown in FIG. 9.

[0576] In some embodiments, the protein binds to one or more amino acids that form the catalytic triad of plasma kallikrein: His434, Asp483, and/or Ser578 (numbering based on the human sequence).

[0577] In some embodiments, the protein binds one or more amino acids of: Arg551, Gln553, Tyr555, Thr558, and/or Arg560 (numbering based on the human sequence). In some embodiments, the plasma kallikrein binding protein binds one or more amino acids of: S478, N481, S525, and K526 (numbering based on the human kallikrein sequence).

[0578] In some embodiments, the protein binds to one or more amino acids of Ser479, Tyr563, and/or Asp585 (numbering based on the human sequence).

[0579] The active site cleft of plasma kallikrein contains three amino acids that form the catalytic triad (His434, Asp483, and Ser578) and result in enzymatic hydrolysis of bound substrate (catalytic triad residues are underlined in FIG. 10). The peptides selected for the CLIPS epitope mapping analysis were determined to be surface accessible and either form or surround the vicinity of the active site. Peptide C1 contains the active site histidine 434. Peptide C3 contains the active site aspartate 483. Peptide C6 contains the active site serine 578. It is possible for an antibody to bind multiple surface exposed amino acids that are discontinuous in amino acid sequence. For example, by CLIPs analysis, X81-B01 appears to bind the C2, C3, C5 and the C6 peptides.

[0580] In some embodiments, the protein binds to an epitope that includes one or more amino acids from CLIPS peptide C1, peptide C2, peptide C3, peptide C4, peptide C5, peptide C6, or peptide C7.

[0581] In some embodiments, the protein binds to an epitope that includes amino acids from at least 2 different CLIPS peptides, e.g., from at least two of peptide C1, peptide C2, peptide C3, peptide C4, peptide C5, peptide C6, or peptide C7.

[0582] The protein can bind to plasma kallikrein, e.g., human plasma kallikrein, with a binding affinity of at least 10⁵, 10⁶, 10⁷, 10⁸, 10⁹, 10¹⁰ and 10¹¹ M⁻¹. In one embodiment, the protein binds to human plasma kallikrein with a K_{off} slower than 1×10⁻³, 5×10⁻⁴ s⁻¹, or 1×10⁻⁴ s⁻¹. In one embodiment, the protein binds to human plasma kallikrein with a Kₒₙ faster than 1×10², 1×10³, or 5×10³ M⁻¹s⁻¹. In one embodiment, the protein binds to plasma kallikrein, but does not bind to tissue kallikrein and/or plasma prekallikrein (e.g., the protein binds to tissue kallikrein and/or plasma prekallikrein less effectively (e.g., 5-, 10-, 50-, 100-, or 1000-fold less or not at all, e.g., as compared to a negative control) than it binds to plasma kallikrein.

[0583] In one embodiment, the protein inhibits human plasma kallikrein activity, e.g., with a Ki of less than 10⁻⁵, 10⁻⁶, 10⁻⁷, 10⁻⁸, 10⁻⁹, and 10⁻¹⁰ M. The protein can have, for example, an IC₅₀ of less than 100 nM, 10 nM, 1, 0.5, or 0.2 nM. For example, the protein may modulate plasma kallikrein activity, as well as the production of Factor XIIa (e.g., from Factor XII) and/or bradykinin (e.g., from high-molecular-weight kininogen (HMWK)). The protein may inhibit plasma kallikrein activity, and/or the production of Factor XIIa (e.g., from Factor XII) and/or bradykinin (e.g., from high-molecular-weight kininogen (HMWK)). The affinity of the protein for human plasma kallikrein can be characterized by a K_{D} of less than 100 nm, less than 10 nM, less than 5 nM, less than 1 nM, less than 0.5 nM. In one embodiment, the protein inhibits plasma kallikrein, but does not inhibit tissue kallikrein (e.g., the protein inhibits tissue kallikrein less effectively (e.g., 5-, 10-, 50-, 100-, or 1000-fold less or not at all, e.g., as compared to a negative control) than it inhibits plasma kallikrein.

[0584] In some embodiments, the protein has an apparent inhibition constant (K_{Lapp}) of less than 1000, 500, 100, 5, 1, 0.5 or 0.2 nM.

[0585] Plasma kallikrein binding proteins may be antibodies. Plasma kallikrein binding antibodies may have their HC and LC variable domain sequences included in a single polypeptide (e.g., scFv), or on different polypeptides (e.g., IgG or Fab).

[0586] In a preferred embodiment, the protein is an antibody (e.g., a human antibody) having the light and heavy chains of antibodies selected from the group consisting of M162-A04, M160-G12, M142-H08×63-G06, X101-A01, X81-B01, X67-D03, X67-G04, DX-2922, X115-B07, X115-D05, X115-E09, X115-H06, X115-A03, X115-D01, X115-F02, X115-G04, M29-D09, M145-D11, M06-D09 and M35-G04.

[0587] In a preferred embodiment, the protein is an antibody (e.g., a human antibody) having the heavy chain of an antibody selected from the group consisting of: M162-A04, M160-G12, M142-H08, X63-G06, X101-A01, X81-B01, X67-D03, X67-G04, X115-B07, X115-D05, X115-E09, X115-H06, X115-A03, X115-D01, X115-F02, X115-G04, M29-D09, M145-D11, M06-D09 and M35-G04.

[0588] In a preferred embodiment, the protein is an antibody (e.g., a human antibody) having the light chain of an antibody selected from the group consisting of: M162-A04, M160-G12, M142-H08×63-G06, X101-A01, X81-B01, X67-D03, X67-G04, X115-B07, X115-D05, X115-E09, X115-H06, X115-A03, X115-D01, X115-F02, X115-G04, M29-D09, M145-D11, M06-D09 and M35-G04.

[0589] In a preferred embodiment, the protein is an antibody (e.g., a human antibody) having light and heavy antibody variable regions of an antibody selected from the group consisting of M162-A04, M160-G12, M142-H08, X63-G06, X101-A01, X81-B01, X67-D03, X67-G04, X115-B07, X115-D05, X115-E09, X115-H06, X115-A03, X115-D01, X115-F02, X115-G04, M29-D09, M145-D11, M06-D09 and M35-G04.

[0590] In a preferred embodiment, the protein is an antibody (e.g., a human antibody) having a heavy chain antibody variable region of an antibody selected from the group consisting of: M162-A04, M160-G12, M142-H08, X63-G06, X101-A01, X81-B01, X67-D03, X67-G04, X115-B07, X115-D05, X115-E09, X115-H06, X115-A03, X115-D01, X115-F02, X115-G04, M29-D09, M145-D11, M06-D09 and M35-G04.

[0591] In a preferred embodiment, the protein is an antibody (e.g., a human antibody) having a light chain antibody variable region of an antibody selected from the group consisting of: M162-A04, M160-G12, M142-H08, X63-G06, X101-A01, X81-B01, X67-D03, X67-G04, X115-B07, X115-D05, X115-E09, X115-H06, X115-A03, X115-D01, X115-F02, X115-G04, M29-D09, M145-D11, M06-D09 and M35-G04.

[0592] In a preferred embodiment, the protein is an antibody (e.g., a human antibody) having one or more (e.g., 1, 2, or 3) heavy chain CDRs selected from the corresponding CDRs of the group of heavy chains consisting of M162-A04, M160-G12, M142-H08, X63-G06, X101-A01, X81-B01, X67-D03, X67-G04, X115-B07, X115-D05, X115-E09, X115-H06, X115-A03, X115-D01, X115-F02, X115-G04, M29-D09, M145-D11, M06-D09 and M35-G04.

[0593] In a preferred embodiment, the protein is an antibody (e.g., a human antibody) having one or more (e.g., 1, 2, or 3) light chain CDRs selected from the corresponding CDRs of the group of light chains consisting of M162-A04, M160-G12, M142-H08, X63-G06, X101-A01, X81-B01, X67-D03, X67-G04, X115-B07, X115-D05, X115-E09, X115-H06, X115-A03, X115-D01, X115-F02, X115-G04, M29-D09, M145-D11, M06-D09 and M35-G04.

[0594] In a preferred embodiment, the protein is an antibody (e.g., a human antibody) having one or more (e.g., 1, 2, or 3) heavy chain CDRs and one or more (e.g., 1, 2, or 3) light chain CDRs selected from the corresponding CDRs of the group of light chains consisting of M162-A04, M160-G12, M142-H08, X63-G06, X101-A01, X81-B01, X67-D03, X67-G04, X115-B07, X115-D05, X115-E09, X115-H06, X115-A03, X115-D01, X115-F02, X115-G04, M29-D09, M145-D11, M06-D09 and M35-G04.

[0595] In one embodiment, the HC and LC variable domain sequences are components of the same polypeptide chain. In another, the HC and LC variable domain sequences are components of different polypeptide chains. For example, the protein is an IgG, e.g., IgG1, IgG2, IgG3, or IgG4. The protein can be a soluble Fab. In other implementations the protein includes a Fab2′, scFv, minibody, scFv::Fc fusion, Fab::HSA fusion, HSA::Fab fusion, Fab::HSA::Fab fusion, or other molecule that comprises the antigen combining site of one of the binding proteins herein. The VH and VL regions of these Fabs can be provided as IgG, Fab, Fab2, Fab2′, scFv, PEGylated Fab, PEGylated scFv, PEGylated Fab2, VH::CH1::HSA+LC, HSA::VH::CH1+LC, LC::HSA+VH::CH1, HSA::LC+VH::CH1, or other appropriate construction.

[0596] In one embodiment, the protein is a human or humanized antibody or is non-immunogenic in a human. For example, the protein includes one or more human antibody framework regions, e.g., all human framework regions, or framework regions at least 85, 88, 89, 90, 91, 92, 93, 94, 95, 96, 97, 98, 99% identical to human framework regions. In one embodiment, the protein includes a human Fc domain, or an Fc domain that is at least 95, 96, 97, 98, or 99% identical to a human Fc domain.

[0597] In one embodiment, the protein is a primate or primatized antibody or is non-immunogenic in a human. For example, the protein includes one or more primate antibody framework regions, e.g., all primate framework regions, or framework regions at least 85, 88, 89, 90, 91, 92, 93, 94, 95, 96, 97, 98, 99% identical to primate framework regions. In one embodiment, the protein includes a primate Fc domain, or an Fc domain that is at least 95, 96, 97, 98, or 99% identical to a primate Fc domain. “Primate” includes humans (Homo sapiens), chimpanzees (Pan troglodytes and Pan paniscus (bonobos)), gorillas (Gorilla gorilla), gibons, monkeys, lemurs, aye-ayes (Daubentonia madagascariensis), and tarsiers.

[0598] In some embodiments, the affinity of the primate antibody for human plasma kallikrein is characterized by a K_{D} of less than 1000, 500, 100, 10, 5, 1, 0.5 nM, e.g., less than 10 nM, less than 1 nM, or less than 0.5 nM.

[0599] In certain embodiments, the protein includes no sequences from mice or rabbits (e.g., is not a murine or rabbit antibody).

[0600] In some aspects, the disclosure provides the use of proteins (e.g., binding proteins, e.g., antibodies) (e.g., the proteins described herein) that bind to plasma kallikrein (e.g., human plasma kallikrein) and include at least one immunoglobin variable region in methods for treating (or preventing) a plasma kallikrein associated disorder or condition. For example, the plasma kallikrein binding protein includes a heavy chain (HC) immunoglobulin variable domain sequence and a light chain (LC) immunoglobulin variable domain sequence. A number of exemplary plasma kallikrein binding proteins are described herein.

[0601] The plasma kallikrein binding protein may be an isolated protein (e.g., at least 70, 80, 90, 95, or 99% free of other proteins).

[0602] The plasma kallikrein binding protein may additionally inhibit plasma kallikrein, e.g., human plasma kallikrein and/or murine plasma kallikrein. In some embodiments, it may be preferred to have an plasma kallikrein binding protein bind to both human and murine plasma kallikrein, as these antibodies can be tested for efficacy in a mouse model.

### Plasma Kallikrein

[0603] Exemplary plasma kallikrein sequences against which plasma kallikrein binding proteins may be developed can include human, mouse, or rat plasma kallikrein amino acid sequences, a sequence that is 80%, 85%, 90%, 95%, 96%, 97%, 98%, or 99% identical to one of these sequences, or a fragment thereof, e.g., of a sequence provided below.

[0604] The sequence of human plasma kallikrein that was used in selections and subsequent screening is shown below (accession number NP_{—}000883.2). The human plasma kallikrein (86 kDa) that was used was purified from human plasma and activated with factor XIIa by a commercial vendor. Factor XIIa activates prekallikrein by cleaving the polypeptide sequence at a single site (between Arg371-Ile372, cleavage site marked by “/” in the sequence below) to generate active plasma kallikrein, which then consists of two disulfide linked polypeptides; a heavy chain of approximately 52 kDa and a catalytic domain of approximately 34 kDa [Colman and Schmaier, (1997) “Contact System: A Vascular Biology Modulator With Anticoagulant, Profibrinolytic, Antiadhesive, and Proinflammatory Attributes” Blood, 90, 3819-3843]

GCLTQLYENAFFRGGDVASMYTPNAQYCQMRCTFHPRCLLFSFLPASS
INDMEKRFGCFLKDSVTGTLPKVHRTGAVSGHSLKQCGHQISACHRDIY
KGVDMRGVNFNVSKVSSVEECQKRCTSNIRCQFFSYATQTFHKAE
YRNNCLLKYSPGGTPTAIKVLSNVESGFSLKPCALSEIGCHMNIFQHLAF
SDVDVARVLTPDAFVCRTICTYHPNCLFFTFYTNVWKIESQRNVCLLKTS
ESGTPSSSTPQENTISGYSLLTCKRTLPEPCHSKIYPGVDFGGEELNVTF
VKGVNVCQETCTKMIRCQFFTYSLLPEDCKEEKCKCFLRLSMDGSPTRI
AYGTQGSSGYSLRLCNTGDNSVCTTKTSTR/IVGGTNSSWGEWPWQVS
LQVKLTAQRHLCGGSLIGHQWVLTAAHCFDGLPLQDVWRIYSGILNLSDI
TKDTPFSQIKEIIIHQNYKVSEGNHDIALIKLQAPLNYTEFQKPICLPS
KGDTSTIYTNCWVTGWGFSKEKGEIQNILQKVNIPLVTNEECQKRYQ
DYKITQRMVCAGYKEGGKDACKGDSGGPLVCKHNGMWRLVGITSWGEG
CARREQPGVYTKVAEYMDWILEKTQSSDGKAQMQSPA

[0605] The human, mouse, and rat prekallikrein amino acid sequences, and the mRNA sequences encoding the same, are illustrated below. The sequences of prekallikrein are the same as plasma kallikrein, except that active plasma kallikrein (pkal) has the single polypeptide chain cleaved at a single position (indicated by the “/”) to generate two chains. The sequences provided below are full sequences that include signal sequences. On secretion from the expressing cell, it is expected that the signal sequences are removed.

Human plasma kallikrein (ACCESSION: NP_000883.2)
>gi|78191798|ref|NP_000883.2|plasma kallikrein B1 precursor [Homo
sapiens]
MILFKQATYFISLFATVSCGCLTQLYENAFFRGGDVASMYTPNAQYCQMRCTFHPRCLLFSFLPASSIND
MEKRFGCFLKDSVTGTLPKVHRTGAVSGHSLKQCGHQISACHRDIYKGVDMRGVNFNVSKVSSVEECQKR
CTSNIRCQFFSYATQTFHKAEYRNNCLLKYSPGGTPTAIKVLSNVESGFSLKPCALSEIGCHMNIFQHLA
FSDVDVARVLTPDAFVCRTICTYHPNCLFFTFYTNVWKIESQRNVCLLKTSESGTPSSSTPQENTISGYS
LLTCKRTLPEPCHSKIYPGVDFGGEELNVTFVKGVNVCQETCTKMIRCQFFTYSLLPEDCKEEKCKCFLR
LSMDGSPTRIAYGTQGSSGYSLRLCNTGDNSVCTTKTSTRIVGGTNSSWGEWPWQVSLQVKLTAQRHLCG
GSLIGHQWVLTAAHCFDGLPLQDVWRIYSGILNLSDITKDTPFSQIKEIIIHQNYKVSEGNHDIALIKLQ
APLNYTEFQKPICLPSKGDTSTIYTNCWVTGWGFSKEKGEIQNILQKVNIPLVTNEECQKRYQDYKITQR
MVCAGYKEGGKDACKGDSGGPLVCKHNGMWRLVGITSWGEGCARREQPGVYTKVAEYMDWILEKTQSSDG
KAQMQSPA
Human plasma kallikrein mRNA (ACCESSION: NM_000892)
>gi|78191797|ref|NM_000892.3|Homo sapiens kallikrein B, plasma
(Fletcher factor) 1 (KLKB1), mRNA
AGAACAGCTTGAAGACCGTTCATTTTTAAGTGACAAGAGACTCACCTCCAAGAAGCAATTGTGTTTTCAG
AATGATTTTATTCAAGCAAGCAACTTATTTCATTTCCTTGTTTGCTACAGTTTCCTGTGGATGTCTGACT
CAACTCTATGAAAACGCCTTCTTCAGAGGTGGGGATGTAGCTTCCATGTACACCCCAAATGCCCAATACT
GCCAGATGAGGTGCACATTCCACCCAAGGTGTTTGCTATTCAGTTTTCTTCCAGCAAGTTCAATCAATGA
CATGGAGAAAAGGTTTGGTTGCTTCTTGAAAGATAGTGTTACAGGAACCCTGCCAAAAGTACATCGAACA
GGTGCAGTTTCTGGACATTCCTTGAAGCAATGTGGTCATCAAATAAGTGCTTGCCATCGAGACATTTATA
AAGGAGTTGATATGAGAGGAGTCAATTTTAATGTGTCTAAGGTTAGCAGTGTTGAAGAATGCCAAAAAAG
GTGCACCAGTAACATTCGCTGCCAGTTTTTTTCATATGCCACGCAAACATTTCACAAGGCAGAGTACCGG
AACAATTGCCTATTAAAGTACAGTCCCGGAGGAACACCTACCGCTATAAAGGTGCTGAGTAACGTGGAAT
CTGGATTCTCACTGAAGCCCTGTGCCCTTTCAGAAATTGGTTGCCACATGAACATCTTCCAGCATCTTGC
GTTCTCAGATGTGGATGTTGCCAGGGTTCTCACTCCAGATGCTTTTGTGTGTCGGACCATCTGCACCTAT
CACCCCAACTGCCTCTTCTTTACATTCTATACAAATGTATGGAAAATCGAGTCACAAAGAAATGTTTGTC
TTCTTAAAACATCTGAAAGTGGCACACCAAGTTCCTCTACTCCTCAAGAAAACACCATATCTGGATATAG
CCTTTTAACCTGCAAAAGAACTTTACCTGAACCCTGCCATTCTAAAATTTACCCGGGAGTTGACTTTGGA
GGAGAAGAATTGAATGTGACTTTTGTTAAAGGAGTGAATGTTTGCCAAGAGACTTGCACAAAGATGATTC
GCTGTCAGTTTTTCACTTATTCTTTACTCCCAGAAGACTGTAAGGAAGAGAAGTGTAAGTGTTTCTTAAG
ATTATCTATGGATGGTTCTCCAACTAGGATTGCGTATGGGACACAAGGGAGCTCTGGTTACTCTTTGAGA
TTGTGTAACACTGGGGACAACTCTGTCTGCACAACAAAAACAAGCACACGCATTGTTGGAGGAACAAACT
CTTCTTGGGGAGAGTGGCCCTGGCAGGTGAGCCTGCAGGTGAAGCTGACAGCTCAGAGGCACCTGTGTGG
AGGGTCACTCATAGGACACCAGTGGGTCCTCACTGCTGCCCACTGCTTTGATGGGCTTCCCCTGCAGGAT
GTTTGGCGCATCTATAGTGGCATTTTAAATCTGTCAGACATTACAAAAGATACACCTTTCTCACAAATAA
AAGAGATTATTATTCACCAAAACTATAAAGTCTCAGAAGGGAATCATGATATCGCCTTGATAAAACTCCA
GGCTCCTTTGAATTACACTGAATTCCAAAAACCAATATGCCTACCTTCCAAAGGTGACACAAGCACAATT
TATACCAACTGTTGGGTAACCGGATGGGGCTTCTCGAAGGAGAAAGGTGAAATCCAAAATATTCTACAAA
AGGTAAATATTCCTTTGGTAACAAATGAAGAATGCCAGAAAAGATATCAAGATTATAAAATAACCCAACG
GATGGTCTGTGCTGGCTATAAAGAAGGGGGAAAAGATGCTTGTAAGGGAGATTCAGGTGGTCCCTTAGTT
TGCAAACACAATGGAATGTGGCGTTTGGTGGGCATCACCAGCTGGGGTGAAGGCTGTGCCCGCAGGGAGC
AACCTGGTGTCTACACCAAAGTCGCTGAGTACATGGACTGGATTTTAGAGAAAACACAGAGCAGTGATGG
AAAAGCTCAGATGCAGTCACCAGCATGAGAAGCAGTCCAGAGTCTAGGCAATTTTTACAACCTGAGTTCA
AGTCAAATTCTGAGCCTGGGGGGTCCTCATCTGCAAAGCATGGAGAGTGGCATCTTCTTTGCATCCTAAG
GACGAAAAACACAGTGCACTCAGAGCTGCTGAGGACAATGTCTGGCTGAAGCCCGCTTTCAGCACGCCGT
AACCAGGGGCTGACAATGCGAGGTCGCAACTGAGATCTCCATGACTGTGTGTTGTGAAATAAAATGGTGA
AAGATCAAAAAA
Mouse plasma kallikrein (ACCESSION: NP_032481.1)
>gi|6680584|ref|NP_032481.1|kallikrein B, plasma 1 [Mus musculus]
MILFNRVGYFVSLFATVSCGCMTQLYKNTFFRGGDLAAIYTPDAQYCQKMCTFHPRCLLFSFLAVTPPKE
TNKRFGCFMKESITGTLPRIHRTGAISGHSLKQCGHQISACHRDIYKGLDMRGSNFNISKTDNIEECQKL
CTNNFHCQFFTYATSAFYRPEYRKKCLLKHSASGTPTSIKSADNLVSGFSLKSCALSEIGCPMDIFQHSA
FADLNVSQVITPDAFVCRTICTFHPNCLFFTFYTNEWETESQRNVCFLKTSKSGRPSPPIPQENAISGYS
LLTCRKTRPEPCHSKIYSGVDFEGEELNVTFVQGADVCQETCTKTIRCQFFIYSLLPQDCKEEGCKCSLR
LSTDGSPTRITYGMQGSSGYSLRLCKLVDSPDCTTKINARIVGGTNASLGEWPWQVSLQVKLVSQTHLCG
GSIIGRQWVLTAAHCFDGIPYPDVWRIYGGILSLSEITKETPSSRIKELIIHQEYKVSEGNYDIALIKLQ
TPLNYTEFQKPICLPSKADTNTIYTNCWVTGWGYTKEQGETQNILQKATIPLVPNEECQKKYRDYVINKQ
MICAGYKEGGTDACKGDSGGPLVCKHSGRWQLVGITSWGEGCGRKDQPGVYTKVSEYMDWILEKTQSSDV
RALETSSA
Mouse plasma kallikrein mRNA (ACCESSION: NM_008455.2)
>gi|236465804|ref|NM_008455.2|Mus musculus kallikrein B, plasma 1
(Klkb1), mRNA
AGACCGCCCTCGGTGCCATATTCAGAGGGCTTGAAGACCATCTTCATGTGAAGACTCCCTCTCCTCCAGA
ACCACAACGTGACCATCCTTCCAGGATGATTTTATTCAACCGAGTGGGTTATTTTGTTTCCTTGTTTGCT
ACCGTCTCCTGTGGGTGTATGACTCAACTGTATAAAAATACCTTCTTCAGAGGTGGGGATCTAGCTGCCA
TCTACACCCCAGATGCCCAGTACTGTCAGAAGATGTGCACTTTTCACCCCAGGTGCCTGCTGTTCAGCTT
TCTCGCCGTGACTCCACCCAAAGAGACAAATAAACGGTTTGGTTGCTTCATGAAAGAGAGCATTACAGGG
ACTTTGCCAAGAATACACCGGACAGGGGCCATTTCTGGTCATTCTTTAAAGCAGTGTGGCCATCAAATAA
GTGCTTGCCACCGAGACATATACAAAGGACTTGATATGAGAGGGTCCAACTTTAATATCTCTAAGACCGA
CAATATTGAAGAATGCCAGAAACTGTGCACAAATAATTTTCACTGCCAATTTTTCACATATGCTACAAGT
GCATTTTACAGACCAGAGTACCGGAAGAAGTGCCTGCTGAAGCACAGTGCAAGCGGAACACCCACCAGCA
TAAAGTCAGCGGACAACCTGGTGTCTGGATTCTCACTGAAGTCCTGTGCGCTTTCGGAGATAGGTTGCCC
CATGGATATTTTCCAGCACTCTGCCTTTGCAGACCTGAATGTAAGCCAGGTCATCACCCCCGATGCCTTT
GTGTGTCGCACCATCTGCACCTTCCATCCCAACTGCCTTTTCTTCACGTTCTACACGAATGAATGGGAGA
CAGAATCACAGAGAAATGTTTGTTTTCTTAAGACGTCTAAAAGTGGAAGACCAAGTCCCCCTATTCCTCA
AGAAAACGCTATATCTGGATATAGTCTCCTCACCTGCAGAAAAACTCGCCCTGAACCCTGCCATTCCAAA
ATTTACTCTGGAGTTGACTTTGAAGGGGAAGAACTGAATGTGACCTTCGTGCAAGGAGCAGATGTCTGCC
AAGAGACTTGTACAAAGACAATCCGCTGCCAGTTTTTTATTTACTCCTTACTCCCCCAAGACTGCAAGGA
GGAGGGGTGTAAATGTTCCTTAAGGTTATCCACAGATGGCTCCCCAACTAGGATCACCTATGGCATGCAG
GGGAGCTCCGGTTATTCTCTGAGATTGTGTAAACTTGTGGACAGCCCTGACTGTACAACAAAAATAAATG
CACGTATTGTGGGAGGAACAAACGCTTCTTTAGGGGAGTGGCCATGGCAGGTCAGCCTGCAAGTGAAGCT
GGTATCTCAGACCCATTTGTGTGGAGGGTCCATCATTGGTCGCCAATGGGTACTGACAGCTGCCCATTGC
TTTGATGGAATTCCCTATCCAGATGTGTGGCGTATATATGGCGGAATTCTTAGTCTGTCCGAGATTACGA
AAGAAACGCCTTCCTCGAGAATAAAGGAGCTTATTATTCATCAGGAATACAAAGTCTCAGAAGGCAATTA
TGATATTGCCTTAATAAAGCTTCAGACGCCCCTGAATTATACTGAATTCCAAAAACCAATATGCCTGCCT
TCCAAAGCTGACACAAATACAATTTATACCAACTGTTGGGTGACTGGATGGGGCTACACGAAGGAACAAG
GTGAAACGCAAAATATTCTACAAAAGGCTACTATTCCTTTGGTACCAAATGAAGAATGCCAGAAAAAATA
CAGAGATTATGTTATAAACAAGCAGATGATCTGTGCTGGCTACAAAGAAGGCGGAACAGACGCTTGTAAG
GGAGATTCCGGTGGCCCCTTAGTCTGTAAACACAGTGGACGGTGGCAGTTGGTGGGTATCACCAGCTGGG
GTGAAGGCTGCGCCCGCAAGGACCAACCAGGAGTCTACACCAAAGTTTCTGAGTACATGGACTGGATATT
GGAGAAGACACAGAGCAGTGATGTAAGAGCTCTGGAGACATCTTCAGCCTGAGGAGGCTGGGTACCAAGG
AGGAAGAACCCAGCTGGCTTTACCACCTGCCCTCAAGGCAAACTAGAGCTCCAGGATTCTCGGCTGTAAA
ATGTTGATAATGGTGTCTACCTCACATCCGTATCATTGGATTGAAAATTCAAGTGTAGATATAGTTGCTG
AAGACAGCGTTTTGCTCAAGTGTGTTTCCTGCCTTGAGTCACAGGAGCTCCAATGGGAGCATTACAAAGA
TCACCAAGCTTGTTAGGAAAGAGAATGATCAAAGGGTTTTATTAGGTAATGAAATGTCTAGATGTGATGC
AATTGAAAAAAAGACCCCAGATTCTAGCACAGTCCTTGGGACCATTCTCATGTAACTGTTGACTCTGGAC
CTCAGCAGATCTCAGAGTTACCTGTCCACTTCTGACATTTGTTTATTAGAGCCTGATGCTATTCTTTCAA
GTGGAGCAAAAAAAAAAAAAAA
Rat plasma kallikrein (ACCESSION: NP_036857.2)
>gi|162138905|ref|NP_036857.2|kallikrein B, plasma 1 [Rattus
norvegicus]
MILFKQVGYFVSLFATVSCGCLSQLYANTFFRGGDLAAIYTPDAQHCQKMCTFHPRCLLFSFLAVSPTKE
TDKRFGCFMKESITGTLPRIHRTGAISGHSLKQCGHQLSACHQDIYEGLDMRGSNFNISKTDSIEECQKL
CTNNIHCQFFTYATKAFHRPEYRKSCLLKRSSSGTPTSIKPVDNLVSGFSLKSCALSEIGCPMDIFQHFA
FADLNVSHVVTPDAFVCRTVCTFHPNCLFFTFYTNEWETESQRNVCFLKTSKSGRPSPPIIQENAVSGYS
LFTCRKARPEPCHFKIYSGVAFEGEELNATFVQGADACQETCTKTIRCQFFTYSLLPQDCKAEGCKCSLR
LSTDGSPTRITYEAQGSSGYSLRLCKVVESSDCTTKINARIVGGTNSSLGEWPWQVSLQVKLVSQNHMCG
GSIIGRQWILTAAHCFDGIPYPDVWRIYGGILNLSEITNKTPFSSIKELIIHQKYKMSEGSYDIALIKLQ
TPLNYTEFQKPICLPSKADTNTIYTNCWVTGWGYTKERGETQNILQKATIPLVPNEECQKKYRDYVITKQ
MICAGYKEGGIDACKGDSGGPLVCKHSGRWQLVGITSWGEGCARKEQPGVYTKVAEYIDWILEKIQSSKE
RALETSPA
Rat plasma kallikrein mRNA (ACCESSION: NM_012725)
>gi|162138904|ref|NM_012725.2|Rattus norvegicus kallikrein B, plasma 1
(Klkb1), mRNA
TGAAGACTAGCTTCATGTGAAGACTCCTTCTCCTCCAGCAGCACAAAGCAACCATCCTTCCAGGATGATT
TTATTCAAACAAGTGGGTTATTTTGTTTCCTTGTTCGCTACAGTTTCCTGTGGGTGTCTGTCACAACTGT
ATGCAAATACCTTCTTCAGAGGTGGGGATCTGGCTGCCATCTACACCCCGGATGCCCAGCACTGTCAGAA
GATGTGCACGTTTCACCCCAGGTGCCTGCTCTTCAGCTTCCTTGCCGTGAGTCCAACCAAGGAGACAGAT
AAAAGGTTTGGGTGCTTCATGAAAGAGAGCATTACAGGGACTTTGCCAAGAATACACCGGACAGGGGCCA
TTTCTGGTCATTCTTTAAAACAGTGTGGCCATCAATTAAGTGCTTGCCACCAAGACATATACGAAGGACT
GGATATGAGAGGGTCCAACTTTAATATATCTAAGACCGACAGTATTGAAGAATGCCAGAAACTGTGCACA
AATAATATTCACTGCCAATTTTTCACATATGCTACAAAAGCATTTCACAGACCAGAGTACAGGAAGAGTT
GCCTGCTGAAGCGCAGTTCAAGTGGAACGCCCACCAGTATAAAGCCAGTGGACAACCTGGTGTCTGGATT
CTCACTGAAGTCCTGTGCTCTCTCAGAGATCGGTTGCCCCATGGATATTTTCCAGCACTTTGCCTTTGCA
GACCTGAATGTAAGCCATGTCGTCACCCCCGATGCCTTCGTGTGTCGCACCGTTTGCACCTTCCATCCCA
ACTGCCTCTTCTTCACATTCTACACGAATGAGTGGGAGACGGAATCACAGAGGAATGTTTGTTTTCTTAA
GACATCTAAAAGTGGAAGACCAAGTCCCCCTATTATTCAAGAAAATGCTGTATCTGGATACAGTCTCTTC
ACCTGCAGAAAAGCTCGCCCTGAACCCTGCCATTTCAAGATTTACTCTGGAGTTGCCTTCGAAGGGGAAG
AACTGAACGCGACCTTCGTGCAGGGAGCAGATGCGTGCCAAGAGACTTGTACAAAGACCATCCGCTGTCA
GTTTTTTACTTACTCATTGCTTCCCCAAGACTGCAAGGCAGAGGGGTGTAAATGTTCCTTAAGGTTATCC
ACGGATGGCTCTCCAACTAGGATCACCTATGAGGCACAGGGGAGCTCTGGTTATTCTCTGAGACTGTGTA
AAGTTGTGGAGAGCTCTGACTGTACGACAAAAATAAATGCACGTATTGTGGGAGGAACAAACTCTTCTTT
AGGAGAGTGGCCATGGCAGGTCAGCCTGCAAGTAAAGTTGGTTTCTCAGAATCATATGTGTGGAGGGTCC
ATCATTGGACGCCAATGGATACTGACGGCTGCCCATTGCTTTGATGGGATTCCCTATCCAGACGTGTGGC
GTATATATGGCGGGATTCTTAATCTGTCAGAGATTACAAACAAAACGCCTTTCTCAAGTATAAAGGAGCT
TATTATTCATCAGAAATACAAAATGTCAGAAGGCAGTTACGATATTGCCTTAATAAAGCTTCAGACACCG
TTGAATTATACTGAATTCCAAAAACCAATATGCCTGCCTTCCAAAGCTGACACAAATACAATTTATACCA
ACTGCTGGGTGACTGGATGGGGCTACACAAAGGAACGAGGTGAGACCCAAAATATTCTACAAAAGGCAAC
TATTCCCTTGGTACCAAATGAAGAATGCCAGAAAAAATATAGAGATTATGTTATAACCAAGCAGATGATC
TGTGCTGGCTACAAAGAAGGTGGAATAGATGCTTGTAAGGGAGATTCCGGTGGCCCCTTAGTTTGCAAAC
ATAGTGGAAGGTGGCAGTTGGTGGGTATCACCAGCTGGGGCGAAGGCTGTGCCCGCAAGGAGCAACCAGG
AGTCTACACCAAAGTTGCTGAGTACATTGACTGGATATTGGAGAAGATACAGAGCAGCAAGGAAAGAGCT
CTGGAGACATCTCCAGCATGAGGAGGCTGGGTACTGATGGGGAAGAGCCCAGCTGGCACCAGCTTTACCA
CCTGCCCTCAAGTCCTACTAGAGCTCCAGAGTTCTCTTCTGCAAAATGTCGATAGTGGTGTCTACCTCGC
ATCCTTACCATAGGATTAAAAGTCCAAATGTAGACACAGTTGCTAAAGACAGCGCCATGCTCAAGCGTGC
TTCCTGCCTTGAGCAACAGGAACGCCAATGAGAACTATCCAAAGATTACCAAGCCTGTTTGGAAATAAAA
TGGTCAAAGGATTTTTATTAGGTAGTGAAATTAGGTAGTTGTCCTTGGAACCATTCTCATGTAACTGTTG
ACTCTGGACCTCAGCAGATCACAGTTACCTTCTGTCCACTTCTGACATTTGTGTACTGGAACCTGATGCT
GTTCTTCCACTTGGAGCAAAGAACTGAGAAACCTGGTTCTATCCATTGGGAAAAAGAGATCTTTGTAACA
TTTCCTTTACAATAAAAAGATGTTCTACTTGGACTTGAAAAAAAAAAAAAAAAAAAAAAAAAA

### Display Libraries

[0606] A display library is a collection of entities; each entity includes an accessible polypeptide component and a recoverable component that encodes or identifies the polypeptide component. The polypeptide component is varied so that different amino acid sequences are represented. The polypeptide component can be of any length, e.g. from three amino acids to over 300 amino acids. A display library entity can include more than one polypeptide component, for example, the two polypeptide chains of a sFab. In one exemplary implementation, a display library can be used to identify proteins that bind to plasma kallikrein. In a selection, the polypeptide component of each member of the library is probed with plasma kallikrein (or fragment thereof) and if the polypeptide component binds to the plasma kallikrein, the display library member is identified, typically by retention on a support.

[0607] Retained display library members are recovered from the support and analyzed. The analysis can include amplification and a subsequent selection under similar or dissimilar conditions. For example, positive and negative selections can be alternated. The analysis can also include determining the amino acid sequence of the polypeptide component and purification of the polypeptide component for detailed characterization.

[0608] A variety of formats can be used for display libraries. Examples include the following.

[0609] Phage Display: The protein component is typically covalently linked to a bacteriophage coat protein. The linkage results from translation of a nucleic acid encoding the protein component fused to the coat protein. The linkage can include a flexible peptide linker, a protease site, or an amino acid incorporated as a result of suppression of a stop codon. Phage display is described, for example, in U.S. Pat. No. 5,223,409; Smith (1985) Science 228:1315-1317; WO 92/18619; WO 91/17271; WO 92/20791; WO 92/15679; WO 93/01288; WO 92/01047; WO 92/09690; WO 90/02809; de Haard et al. (1999) J. Biol. Chem. 274:18218-30; Hoogenboom et al. (1998) Immunotechnology 4:1-20; Hoogenboom et al. (2000) Immunol Today 2:371-8 and Hoet et al. (2005) Nat. Biotechnol. 23(3)344-8. Bacteriophage displaying the protein component can be grown and harvested using standard phage preparatory methods, e.g. PEG precipitation from growth media. After selection of individual display phages, the nucleic acid encoding the selected protein components can be isolated from cells infected with the selected phages or from the phage themselves, after amplification. Individual colonies or plaques can be picked, the nucleic acid isolated and sequenced.

[0610] Other Display Formats. Other display formats include cell based display (see, e.g., WO 03/029456), protein-nucleic acid fusions (see, e.g., U.S. Pat. No. 6,207,446), ribosome display (See, e.g., Mattheakis et al. (1994) Proc. Natl. Acad. Sci. USA 91:9022 and Hanes et al. (2000) Nat. Biotechnol. 18:1287-92; Hanes et al. (2000) Methods Enzymol. 328:404-30; and Schaffitzel et al. (1999) J Immunol Methods. 231(1-2):119-35), and E. coli periplasmic display (J Immunol Methods. 2005 Nov. 22; PMID: 16337958).

[0611] Scaffolds. Scaffolds useful for display include: antibodies (e.g., Fab fragments, single chain Fv molecules (scFv), single domain antibodies, camelid antibodies, and camelized antibodies); T-cell receptors; MHC proteins; extracellular domains (e.g., fibronectin Type III repeats, EGF repeats); protease inhibitors (e.g., Kunitz domains, ecotin, BPTI, and so forth); TPR repeats; trifoil structures; zinc finger domains; DNA-binding proteins; particularly monomeric DNA binding proteins; RNA binding proteins; enzymes, e.g., proteases (particularly inactivated proteases), RNase; chaperones, e.g., thioredoxin and heat shock proteins; intracellular signaling domains (such as SH2 and SH3 domains); linear and constrained peptides; and linear peptide substrates. Display libraries can include synthetic and/or natural diversity. See, e.g., U.S. 2004-0005709.

[0612] Display technology can also be used to obtain binding proteins (e.g., antibodies) that bind particular epitopes of a target. This can be done, for example, by using competing non-target molecules that lack the particular epitope or are mutated within the epitope, e.g., with alanine. Such non-target molecules can be used in a negative selection procedure as described below, as competing molecules when binding a display library to the target, or as a pre-elution agent, e.g., to capture in a wash solution dissociating display library members that are not specific to the target.

[0613] Iterative Selection. In one preferred embodiment, display library technology is used in an iterative mode. A first display library is used to identify one or more binding proteins for a target. These identified binding proteins are then varied using a mutagenesis method to form a second display library. Higher affinity binding proteins are then selected from the second library, e.g., by using higher stringency or more competitive binding and washing conditions.

[0614] In some implementations, the mutagenesis is targeted to regions at the binding interface. If, for example, the identified binding proteins are antibodies, then mutagenesis can be directed to the CDR regions of the heavy or light chains as described herein. Further, mutagenesis can be directed to framework regions near or adjacent to the CDRs. In the case of antibodies, mutagenesis can also be limited to one or a few of the CDRs, e.g., to make precise step-wise improvements. Exemplary mutagenesis techniques include: error-prone PCR, recombination, DNA shuffling, site-directed mutagenesis and cassette mutagenesis.

[0615] In one example of iterative selection, the methods described herein are used to first identify a protein from a display library that binds plasma kallikrein, with at least a minimal binding specificity for a target or a minimal activity, e.g., an equilibrium dissociation constant for binding of less than 0.5 nM, 1 nM, 10 nM, or 100 nM. The nucleic acid sequences encoding the initial identified proteins are used as a template nucleic acid for the introduction of variations, e.g., to identify a second protein that has enhanced properties (e.g., binding affinity, kinetics, or stability) relative to the initial protein.

[0616] Off-Rate Selection. Since a slow dissociation rate can be predictive of high affinity, particularly with respect to interactions between polypeptides and their targets, the methods described herein can be used to isolate binding proteins with a desired (e.g., reduced) kinetic dissociation rate for a binding interaction to a target.

[0617] To select for slow dissociating binding proteins from a display library, the library is contacted to an immobilized target. The immobilized target is then washed with a first solution that removes non-specifically or weakly bound biomolecules. Then the bound binding proteins are eluted with a second solution that includes a saturating amount of free target or a target specific high-affinity competing monoclonal antibody, i.e., replicates of the target that are not attached to the particle. The free target binds to biomolecules that dissociate from the target. Rebinding is effectively prevented by the saturating amount of free target relative to the much lower concentration of immobilized target.

[0618] The second solution can have solution conditions that are substantially physiological or that are stringent. Typically, the solution conditions of the second solution are identical to the solution conditions of the first solution. Fractions of the second solution are collected in temporal order to distinguish early from late fractions. Later fractions include biomolecules that dissociate at a slower rate from the target than biomolecules in the early fractions.

[0619] Further, it is also possible to recover display library members that remain bound to the target even after extended incubation. These can either be dissociated using chaotropic conditions or can be amplified while attached to the target. For example, phage bound to the target can be contacted to bacterial cells.

[0620] Selecting or Screening for Specificity. The display library screening methods described herein can include a selection or screening process that discards display library members that bind to a non-target molecule. Examples of non-target molecules include streptavidin on magnetic beads, blocking agents such as bovine serum albumin, non-fat bovine milk, soy protein, any capturing or target immobilizing monoclonal antibody, or non-transfected cells which do not express the target.

[0621] In one implementation, a so-called “negative selection” step is used to discriminate between the target and related non-target molecule and a related, but distinct non-target molecule. The display library or a pool thereof is contacted to the non-target molecule. Members of the sample that do not bind the non-target are collected and used in subsequent selections for binding to the target molecule or even for subsequent negative selections. The negative selection step can be prior to or after selecting library members that bind to the target molecule.

[0622] In another implementation, a screening step is used. After display library members are isolated for binding to the target molecule, each isolated library member is tested for its ability to bind to a non-target molecule (e.g., a non-target listed above). For example, a high-throughput ELISA screen can be used to obtain this data. The ELISA screen can also be used to obtain quantitative data for binding of each library member to the target as well as for cross species reactivity to related targets or subunits of the target (e.g., plasma kallikrein) and also under different condition such as pH 6 or pH 7.5. The non-target and target binding data are compared (e.g., using a computer and software) to identify library members that specifically bind to the target.

### Other Exemplary Expression Libraries

[0623] Other types of collections of proteins (e.g., expression libraries) can be used to identify proteins with a particular property (e.g., ability to bind plasma kallikrein), including, e.g., protein arrays of antibodies (see, e.g., De Wildt et al. (2000) Nat. Biotechnol. 18:989-994), lambda gt11 libraries, two-hybrid libraries and so forth.

### Exemplary Libraries

[0624] It is possible to immunize a non-human primate and recover primate antibody genes that can be displayed on phage (see below). From such a library, one can select antibodies that bind the antigen used in immunization. See, for example, Vaccine. (2003) 22(2):257-67 or Immunogenetics. (2005) 57(10):730-8. Thus one could obtain primate antibodies that bind and inhibit plasma kallikrein by immunizing a chimpanzee or macaque and using a variety of means to select or screen for primate antibodies that bind and inhibit plasma kallikrein. One can also make chimeras of primatized Fabs with human constant regions, see Curr Opin Mol. Ther. (2004) 6(6):675-83. “PRIMATIZED antibodies, genetically engineered from cynomolgus macaque monkey and human components, are structurally indistinguishable from human antibodies. They may, therefore, be less likely to cause adverse reactions in humans, making them potentially suited for long-term, chronic treatment” Curr Opin Investig Drugs. (2001) 2(5):635-8.

[0625] One exemplary type of library presents a diverse pool of polypeptides, each of which includes an immunoglobulin domain, e.g., an immunoglobulin variable domain. Of interest are display libraries where the members of the library include primate or “primatized” (e.g., such as human, non-human primate or “humanized”) immunoglobin domains (e.g., immunoglobin variable domains) or chimeric primatized Fabs with human constant regions. Human or humanized immunoglobin domain libraries may be used to identify human or “humanized” antibodies that, for example, recognize human antigens. Because the constant and framework regions of the antibody are human, these antibodies may avoid themselves being recognized and targeted as antigens when administered to humans. The constant regions may also be optimized to recruit effector functions of the human immune system. The in vitro display selection process surmounts the inability of a normal human immune system to generate antibodies against self-antigens.

[0626] A typical antibody display library displays a polypeptide that includes a VH domain and a VL domain. An “immunoglobulin domain” refers to a domain from the variable or constant domain of immunoglobulin molecules. Immunoglobulin domains typically contain two β-sheets formed of about seven β-strands, and a conserved disulphide bond (see, e.g., A. F. Williams and A. N. Barclay, 1988, Ann. Rev. Immunol. 6:381-405). The display library can display the antibody as a Fab fragment (e.g., using two polypeptide chains) or a single chain Fv (e.g., using a single polypeptide chain). Other formats can also be used.

[0627] As in the case of the Fab and other formats, the displayed antibody can include one or more constant regions as part of a light and/or heavy chain. In one embodiment, each chain includes one constant region, e.g., as in the case of a Fab. In other embodiments, additional constant regions are displayed.

[0628] Antibody libraries can be constructed by a number of processes (see, e.g., de Haard et al., 1999, J. Biol. Chem. 274:18218-30; Hoogenboom et al., 1998, Immunotechnology 4:1-20; Hoogenboom et al., 2000, Immunol. Today 21:371-378, and Hoet et al. (2005) Nat Biotechnol. 23(3):344-8. Further, elements of each process can be combined with those of other processes. The processes can be used such that variation is introduced into a single immunoglobulin domain (e.g., VH or VL) or into multiple immunoglobulin domains (e.g., VH and VL). The variation can be introduced into an immunoglobulin variable domain, e.g., in the region of one or more of CDR1, CDR2, CDR3, FR1, FR2, FR3, and/or FR4, referring to such regions of either and both of heavy and light chain variable domains. For example, the variation(s) may be introduced into all three CDRs of a given variable domain, or into CDR1 and CDR2, e.g., of a heavy chain variable domain. Any combination is feasible. In one process, antibody libraries are constructed by inserting diverse oligonucleotides that encode CDRs into the corresponding regions of the nucleic acid. The oligonucleotides can be synthesized using monomeric nucleotides or trinucleotides. For example, Knappik et al., 2000, J. Mol. Biol. 296:57-86 describe a method for constructing CDR encoding oligonucleotides using trinucleotide synthesis and a template with engineered restriction sites for accepting the oligonucleotides.

[0629] In another process, an animal (e.g., a rodent) is immunized with plasma kallikrein. The animal is optionally boosted with the antigen to further stimulate the response. Then spleen cells are isolated from the animal, and nucleic acid encoding VH and/or VL domains is amplified and cloned for expression in the display library.

[0630] In yet another process, antibody libraries are constructed from nucleic acid amplified from naïve germline immunoglobulin genes. The amplified nucleic acid includes nucleic acid encoding the VH and/or VL domain. Sources of immunoglobulin-encoding nucleic acids are described below. Amplification can include PCR, e.g., with primers that anneal to the conserved constant region, or another amplification method.

[0631] Nucleic acid encoding immunoglobulin domains can be obtained from the immune cells of, e.g., a primate (e.g., a human), mouse, rabbit, camel, or rodent. In one example, the cells are selected for a particular property. B cells at various stages of maturity can be selected. In another example, the B cells are naïve.

[0632] In one embodiment, fluorescent-activated cell sorting (FACS) is used to sort B cells that express surface-bound IgM, IgD, or IgG molecules. Further, B cells expressing different isotypes of IgG can be isolated. In another preferred embodiment, the B or T cells are cultured in vitro. The cells can be stimulated in vitro, e.g., by culturing with feeder cells or by adding mitogens or other modulatory reagents, such as antibodies to CD40, CD40 ligand or CD20, phorbol myristate acetate, bacterial lipopolysaccharide, concanavalin A, phytohemagglutinin, or pokeweed mitogen.

[0633] In another embodiment, the cells are isolated from a subject that has a disease of condition described herein, e.g., a plasma kallikrein associated disease or condition.

[0634] In one preferred embodiment, the cells have activated a program of somatic hypermutation. Cells can be stimulated to undergo somatic mutagenesis of immunoglobulin genes, for example, by treatment with anti-immunoglobulin, anti-CD40, and anti-CD38 antibodies (see, e.g., Bergthorsdottir et al., 2001, J. Immunol. 166:2228). In another embodiment, the cells are naïve.

[0635] The nucleic acid encoding an immunoglobulin variable domain can be isolated from a natural repertoire by the following exemplary method. First, RNA is isolated from the immune cell. Full length (i.e., capped) mRNAs are separated (e.g. by degrading uncapped RNAs with calf intestinal phosphatase). The cap is then removed with tobacco acid pyrophosphatase and reverse transcription is used to produce the cDNAs.

[0636] The reverse transcription of the first (antisense) strand can be done in any manner with any suitable primer. See, e.g., de Haard et al., 1999, J. Biol. Chem. 274:18218-30. The primer binding region can be constant among different immunoglobulins, e.g., in order to reverse transcribe different isotypes of immunoglobulin. The primer binding region can also be specific to a particular isotype of immunoglobulin. Typically, the primer is specific for a region that is 3′ to a sequence encoding at least one CDR. In another embodiment, poly-dT primers may be used (and may be preferred for the heavy-chain genes).

[0637] A synthetic sequence can be ligated to the 3′ end of the reverse transcribed strand. The synthetic sequence can be used as a primer binding site for binding of the forward primer during PCR amplification after reverse transcription. The use of the synthetic sequence can obviate the need to use a pool of different forward primers to fully capture the available diversity.

[0638] The variable domain-encoding gene is then amplified, e.g., using one or more rounds. If multiple rounds are used, nested primers can be used for increased fidelity. The amplified nucleic acid is then cloned into a display library vector.

### Secondary Screening Methods

[0639] After selecting candidate library members that bind to a target, each candidate library member can be further analyzed, e.g., to further characterize its binding properties for the target, e.g., plasma kallikrein. Each candidate library member can be subjected to one or more secondary screening assays. The assay can be for a binding property, a catalytic property, an inhibitory property, a physiological property (e.g., cytotoxicity, renal clearance, immunogenicity), a structural property (e.g., stability, conformation, oligomerization state) or another functional property. The same assay can be used repeatedly, but with varying conditions, e.g., to determine pH, ionic, or thermal sensitivities.

[0640] As appropriate, the assays can use a display library member directly, a recombinant polypeptide produced from the nucleic acid encoding the selected polypeptide, or a synthetic peptide synthesized based on the sequence of the selected polypeptide. In the case of selected Fabs, the Fabs can be evaluated or can be modified and produced as intact IgG proteins. Exemplary assays for binding properties include the following.

[0641] ELISA. Binding proteins can be evaluated using an ELISA assay. For example, each protein is contacted to a microtitre plate whose bottom surface has been coated with the target, e.g., a limiting amount of the target. The plate is washed with buffer to remove non-specifically bound polypeptides. Then the amount of the binding protein bound to the target on the plate is determined by probing the plate with an antibody that can recognize the binding protein, e.g., a tag or constant portion of the binding protein. The antibody is linked to a detection system (e.g., an enzyme such as alkaline phosphatase or horse radish peroxidase (HRP) which produces a colorimetric product when appropriate substrates are provided).

[0642] Homogeneous Binding Assays. The ability of a binding protein described herein to bind a target can be analyzed using a homogenous assay, i.e., after all components of the assay are added, additional fluid manipulations are not required. For example, fluorescence resonance energy transfer (FRET) can be used as a homogenous assay (see, for example, Lakowicz et al., U.S. Pat. No. 5,631,169; Stavrianopoulos, et al., U.S. Pat. No. 4,868,103). A fluorophore label on the first molecule (e.g., the molecule identified in the fraction) is selected such that its emitted fluorescent energy can be absorbed by a fluorescent label on a second molecule (e.g., the target) if the second molecule is in proximity to the first molecule. The fluorescent label on the second molecule fluoresces when it absorbs to the transferred energy. Since the efficiency of energy transfer between the labels is related to the distance separating the molecules, the spatial relationship between the molecules can be assessed. In a situation in which binding occurs between the molecules, the fluorescent emission of the ‘acceptor’ molecule label in the assay should be maximal. A binding event that is configured for monitoring by FRET can be conveniently measured through standard fluorometric detection means, e.g., using a fluorimeter. By titrating the amount of the first or second binding molecule, a binding curve can be generated to estimate the equilibrium binding constant.

[0643] Another example of a homogenous assay is ALPHASCREEN™ (Packard Bioscience, Meriden CT). ALPHASCREEN™ uses two labeled beads. One bead generates singlet oxygen when excited by a laser. The other bead generates a light signal when singlet oxygen diffuses from the first bead and collides with it. The signal is only generated when the two beads are in proximity. One bead can be attached to the display library member, the other to the target. Signals are measured to determine the extent of binding.

[0644] Surface Plasmon Resonance (SPR). The interaction of binding protein and a target can be analyzed using SPR. SPR or Biomolecular Interaction Analysis (BIA) detects biospecific interactions in real time, without labeling any of the interactants. Changes in the mass at the binding surface (indicative of a binding event) of the BIA chip result in alterations of the refractive index of light near the surface (the optical phenomenon of surface plasmon resonance (SPR)). The changes in the refractivity generate a detectable signal, which are measured as an indication of real-time reactions between biological molecules. Methods for using SPR are described, for example, in U.S. Pat. No. 5,641,640; Raether, 1988, Surface Plasmons Springer Verlag; Sjolander and Urbaniczky, 1991, Anal. Chem. 63:2338-2345; Szabo et al., 1995, Curr. Opin. Struct. Biol. 5:699-705 and on-line resources provide by BIAcore International AB (Uppsala, Sweden).

[0645] Information from SPR can be used to provide an accurate and quantitative measure of the equilibrium dissociation constant (K_{D}), and kinetic parameters, including Kₒₙ and K_{off}, for the binding of a binding protein to a target. Such data can be used to compare different biomolecules. For example, selected proteins from an expression library can be compared to identify proteins that have high affinity for the target or that have a slow K_{off}. This information can also be used to develop structure-activity relationships (SAR). For example, the kinetic and equilibrium binding parameters of matured versions of a parent protein can be compared to the parameters of the parent protein. Variant amino acids at given positions can be identified that correlate with particular binding parameters, e.g., high affinity and slow K_{off}. This information can be combined with structural modeling (e.g., using homology modeling, energy minimization, or structure determination by x-ray crystallography or NMR). As a result, an understanding of the physical interaction between the protein and its target can be formulated and used to guide other design processes.

[0646] Cellular Assays. Binding proteins can be screened for ability to bind to cells which transiently or stably express and display the target of interest on the cell surface. For example, plasma kallikrein binding proteins can be fluorescently labeled and binding to plasma kallikrein in the presence of absence of antagonistic antibody can be detected by a change in fluorescence intensity using flow cytometry e.g., a FACS machine.

### Other Exemplary Methods for Obtaining Plasma Kallikrein Binding Proteins

[0647] In addition to the use of display libraries, other methods can be used to obtain a plasma kallikrein binding protein (e.g., antibody). For example, plasma kallikrein protein or a fragment thereof can be used as an antigen in a non-human animal, e.g., a rodent.

[0648] In one embodiment, the non-human animal includes at least a part of a human immunoglobulin gene. For example, it is possible to engineer mouse strains deficient in mouse antibody production with large fragments of the human Ig loci. Using the hybridoma technology, antigen-specific monoclonal antibodies (Mabs) derived from the genes with the desired specificity may be produced and selected. See, e.g., XENOMOUSE™, Green et al., 1994, Nat. Gen. 7:13-21; U.S. 2003-0070185, WO 96/34096, published Oct. 31, 1996, and PCT Application No. PCT/US96/05928, filed Apr. 29, 1996.

[0649] In another embodiment, a monoclonal antibody is obtained from the non-human animal, and then modified, e.g., humanized or deimmunized. Winter describes a CDR-grafting method that may be used to prepare the humanized antibodies (UK Patent Application GB 2188638A, filed on Mar. 26, 1987; U.S. Pat. No. 5,225,539. All of the CDRs of a particular human antibody may be replaced with at least a portion of a non-human CDR or only some of the CDRs may be replaced with non-human CDRs. It is only necessary to replace the number of CDRs required for binding of the humanized antibody to a predetermined antigen.

[0650] Humanized antibodies can be generated by replacing sequences of the Fv variable region that are not directly involved in antigen binding with equivalent sequences from human Fv variable regions. General methods for generating humanized antibodies are provided by Morrison, S. L., 1985, Science 229:1202-1207, by Oi et al., 1986, BioTechniques 4:214, and by Queen et al. U.S. Pat. Nos. 5,585,089, 5,693,761 and 5,693,762. Those methods include isolating, manipulating, and expressing the nucleic acid sequences that encode all or part of immunoglobulin Fv variable regions from at least one of a heavy or light chain. Numerous sources of such nucleic acid are available. For example, nucleic acids may be obtained from a hybridoma producing an antibody against a predetermined target, as described above. The recombinant DNA encoding the humanized antibody, or fragment thereof, can then be cloned into an appropriate expression vector.

[0651] Reducing Immunogenicity of Plasma Kallikrein Binding Proteins

[0652] Immunoglobin plasma kallikrein binding proteins (e.g., IgG or Fab plasma kallikrein binding proteins) may be modified to reduce immunogenicity. Reduced immunogenicity is desirable in plasma kallikrein binding proteins intended for use as therapeutics, as it reduces the chance that the subject will develop an immune response against the therapeutic molecule. Techniques useful for reducing immunogenicity of plasma kallikrein binding proteins include deletion/modification of potential human T cell epitopes and “germlining” of sequences outside of the CDRs (e.g., framework and Fc).

[0653] A plasma kallikrein-binding antibody may be modified by specific deletion of human T cell epitopes or “deimmunization,” e.g., by the methods disclosed in WO 98/52976 and WO 00/34317. Briefly, the heavy and light chain variable regions of an antibody are analyzed for peptides that bind to MHC Class II; these peptides represent potential T-cell epitopes (as defined in WO 98/52976 and WO 00/34317). For detection of potential T-cell epitopes, a computer modeling approach termed “peptide threading” can be applied, and in addition a database of human MHC class II binding peptides can be searched for motifs present in the VH and VL sequences, as described in WO 98/52976 and WO 00/34317. These motifs bind to any of the 18 major MHC class II DR allotypes, and thus constitute potential T cell epitopes. Potential T-cell epitopes detected can be eliminated by substituting small numbers of amino acid residues in the variable regions, or preferably, by single amino acid substitutions. As far as possible conservative substitutions are made, often but not exclusively, an amino acid common at this position in human germline antibody sequences may be used. Human germline sequences are disclosed in Tomlinson, I. A. et al., 1992, J. Mol. Biol. 227:776-798; Cook, G. P. et al., 1995, Immunol. Today Vol. 16 (5): 237-242; Chothia, D. et al., 1992, J. Mol. Bio. 227:799-817. The V BASE directory provides a comprehensive directory of human immunoglobulin variable region sequences (compiled by Tomlinson, I. A. et al. MRC Centre for Protein Engineering, Cambridge, UK). After the deimmunizing changes are identified, nucleic acids encoding V_{H} and V_{L} can be constructed by mutagenesis or other synthetic methods (e.g., de novo synthesis, cassette replacement, and so forth). Mutagenized variable sequence can, optionally, be fused to a human constant region, e.g., human IgG1 or κ constant regions.

[0654] In some cases a potential T cell epitope will include residues which are known or predicted to be important for antibody function. For example, potential T cell epitopes are usually biased towards the CDRs. In addition, potential T cell epitopes can occur in framework residues important for antibody structure and binding. Changes to eliminate these potential epitopes will in some cases require more scrutiny, e.g., by making and testing chains with and without the change. Where possible, potential T cell epitopes that overlap the CDRs were eliminated by substitutions outside the CDRs. In some cases, an alteration within a CDR is the only option, and thus variants with and without this substitution should be tested. In other cases, the substitution required to remove a potential T cell epitope is at a residue position within the framework that might be critical for antibody binding. In these cases, variants with and without this substitution should be tested. Thus, in some cases several variant deimmunized heavy and light chain variable regions were designed and various heavy/light chain combinations tested in order to identify the optimal deimmunized antibody. The choice of the final deimmunized antibody can then be made by considering the binding affinity of the different variants in conjunction with the extent of deimmunization, i.e., the number of potential T cell epitopes remaining in the variable region. Deimmunization can be used to modify any antibody, e.g., an antibody that includes a non-human sequence, e.g., a synthetic antibody, a murine antibody other non-human monoclonal antibody, or an antibody isolated from a display library.

[0655] Plasma kallikrein binding antibodies are “germlined” by reverting one or more non-germline amino acids in framework regions to corresponding germline amino acids of the antibody, so long as binding properties are substantially retained. Similar methods can also be used in the constant region, e.g., in constant immunoglobulin domains.

[0656] Antibodies that bind to plasma kallikrein, e.g., an antibody described herein, may be modified in order to make the variable regions of the antibody more similar to one or more germline sequences. For example, an antibody can include one, two, three, or more amino acid substitutions, e.g., in a framework, CDR, or constant region, to make it more similar to a reference germline sequence. One exemplary germlining method can include identifying one or more germline sequences that are similar (e.g., most similar in a particular database) to the sequence of the isolated antibody. Mutations (at the amino acid level) are then made in the isolated antibody, either incrementally or in combination with other mutations. For example, a nucleic acid library that includes sequences encoding some or all possible germline mutations is made. The mutated antibodies are then evaluated, e.g., to identify an antibody that has one or more additional germline residues relative to the isolated antibody and that is still useful (e.g., has a functional activity). In one embodiment, as many germline residues are introduced into an isolated antibody as possible.

[0657] In one embodiment, mutagenesis is used to substitute or insert one or more germline residues into a framework and/or constant region. For example, a germline framework and/or constant region residue can be from a germline sequence that is similar (e.g., most similar) to the non-variable region being modified. After mutagenesis, activity (e.g., binding or other functional activity) of the antibody can be evaluated to determine if the germline residue or residues are tolerated (i.e., do not abrogate activity). Similar mutagenesis can be performed in the framework regions.

[0658] Selecting a germline sequence can be performed in different ways. For example, a germline sequence can be selected if it meets a predetermined criteria for selectivity or similarity, e.g., at least a certain percentage identity, e.g., at least 75, 80, 85, 90, 91, 92, 93, 94, 95, 96, 97, 98, 99, or 99.5% identity. The selection can be performed using at least 2, 3, 5, or 10 germline sequences. In the case of CDR1 and CDR2, identifying a similar germline sequence can include selecting one such sequence. In the case of CDR3, identifying a similar germline sequence can include selecting one such sequence, but may include using two germline sequences that separately contribute to the amino-terminal portion and the carboxy-terminal portion of the sequence. In other implementations more than one or two germline sequences are used, e.g., to form a consensus sequence.

[0659] In one embodiment, with respect to a particular reference variable domain sequence, e.g., a sequence described herein, a related variable domain sequence has at least 30, 40, 50, 60, 70, 80, 90, 95 or 100% of the CDR amino acid positions that are not identical to residues in the reference CDR sequences, residues that are identical to residues at corresponding positions in a human germline sequence (i.e., an amino acid sequence encoded by a human germline nucleic acid).

[0660] In one embodiment, with respect to a particular reference variable domain sequence, e.g., a sequence described herein, a related variable domain sequence has at least 30, 50, 60, 70, 80, 90 or 100% of the FR regions identical to FR sequence from a human germline sequence, e.g., a germline sequence related to the reference variable domain sequence.

[0661] Accordingly, it is possible to isolate an antibody which has similar activity to a given antibody of interest, but is more similar to one or more germline sequences, particularly one or more human germline sequences. For example, an antibody can be at least 90, 91, 92, 93, 94, 95, 96, 97, 98, 99, or 99.5% identical to a germline sequence in a region outside the CDRs (e.g., framework regions). Further, an antibody can include at least 1, 2, 3, 4, or 5 germline residues in a CDR region, the germline residue being from a germline sequence of similar (e.g., most similar) to the variable region being modified. Germline sequences of primary interest are human germline sequences. The activity of the antibody (e.g., the binding activity as measured by K_{A}) can be within a factor or 100, 10, 5, 2, 0.5, 0.1, and 0.001 of the original antibody.

[0662] Germline sequences of human immunoglobin genes have been determined and are available from a number of sources, including the INTERNATIONAL IMMUNOGENETICS INFORMATION SYSTEM® (IMGT), and the V BASE directory (compiled by Tomlinson, I. A. et al. MRC Centre for Protein Engineering, Cambridge, UK).

[0663] Exemplary germline reference sequences for Vₖₐₚₚₐ include: O12/O2, O18/O8, A20, A30, L14, L1, L15, L4/18a, L5/L19, L8, L23, L9, L24, L11, L12, O11/01, A17, A1, A18, A2, A19/A3, A23, A27, A11, L2/L16, L6, L20, L25, B3, B2, A26/A10, and A14. See, e.g., Tomlinson et al., 1995, EMBO J. 14(18):4628-3.

[0664] A germline reference sequence for the HC variable domain can be based on a sequence that has particular canonical structures, e.g., 1-3 structures in the H1 and H2 hypervariable loops. The canonical structures of hypervariable loops of an immunoglobulin variable domain can be inferred from its sequence, as described in Chothia et al., 1992, J. Mol. Biol. 227:799-817; Tomlinson et al., 1992, J. Mol. Biol. 227:776-798); and Tomlinson et al., 1995, EMBO J. 14(18):4628-38. Exemplary sequences with a 1-3 structure include: DP-1, DP-8, DP-12, DP-2, DP-25, DP-15, DP-7, DP-4, DP-31, DP-32, DP-33, DP-35, DP-40, 7-2, hv3005, hv3005f3, DP-46, DP-47, DP-58, DP-49, DP-50, DP-51, DP-53, and DP-54.

### Protein Production

[0665] Standard recombinant nucleic acid methods can be used to express a protein that binds to plasma kallikrein. Generally, a nucleic acid sequence encoding the protein is cloned into a nucleic acid expression vector. Of course, if the protein includes multiple polypeptide chains, each chain can be cloned into an expression vector, e.g., the same or different vectors, that are expressed in the same or different cells.

[0666] Antibody Production. Some antibodies, e.g., Fabs, can be produced in bacterial cells, e.g., E. coli cells (see e.g., Nadkarni, A. et al., 2007 Protein Expr Purif 52(1):219-29). For example, if the Fab is encoded by sequences in a phage display vector that includes a suppressible stop codon between the display entity and a bacteriophage protein (or fragment thereof), the vector nucleic acid can be transferred into a bacterial cell that cannot suppress a stop codon. In this case, the Fab is not fused to the gene III protein and is secreted into the periplasm and/or media.

[0667] Antibodies can also be produced in eukaryotic cells. In one embodiment, the antibodies (e.g., scFv's) are expressed in a yeast cell such as Pichia (see, e.g., Powers et al., 2001, J. Immunol. Methods. 251:123-35; Schoonooghe S. et al., 2009 BMC Biotechnol. 9:70; Abdel-Salam, H A. et al., 2001 Appl Microbiol Biotechnol 56(1-2):157-64; Takahashi K. et al., 2000 Biosci Biotechnol Biochem 64(10):2138-44; Edqvist, J. et al., 1991 J Biotechnol 20(3):291-300), Hanseula, or Saccharomyces. One of skill in the art can optimize antibody production in yeast by optimizing, for example, oxygen conditions (see e.g., Baumann K., et al. 2010 BMC Syst. Biol. 4:141), osmolarity (see e.g., Dragosits, M. et al., 2010 BMC Genomics 11:207), temperature (see e.g., Dragosits, M. et al., 2009 J Proteome Res. 8(3):1380-92), fermentation conditions (see e.g., Ning, D. et al. 2005 J. Biochem. and Mol. Biol. 38(3): 294-299), strain of yeast (see e.g., Kozyr, A V et al. 2004 Mol Biol (Mosk) 38(6):1067-75; Horwitz, A H. et al., 1988 Proc Natl Acad Sci USA 85(22):8678-82; Bowdish, K. et al. 1991 J Biol Chem 266(18):11901-8), overexpression of proteins to enhance antibody production (see e.g., Gasser, B. et al., 2006 Biotechol. Bioeng. 94(2):353-61), level of acidity of the culture (see e.g., Kobayashi H., et al., 1997 FEMS Microbiol Lett 152(2):235-42), concentrations of substrates and/or ions (see e.g., Ko J H. et al., 2996 Appl Biochem Biotechnol 60(1):41-8). In addition, yeast systems can be used to produce antibodies with an extended half-life (see e.g., Smith, B J. et al. 2001 Bioconjug Chem 12(5):750-756),

[0668] In one preferred embodiment, antibodies are produced in mammalian cells. Preferred mammalian host cells for expressing the clone antibodies or antigen-binding fragments thereof include Chinese Hamster Ovary (CHO cells) (including dhfr-CHO cells, described in Urlaub and Chasin, 1980, Proc. Natl. Acad. Sci. USA 77:4216-4220, used with a DHFR selectable marker, e.g., as described in Kaufman and Sharp, 1982, Mol. Biol. 159:601 621), lymphocytic cell lines, e.g., NSO myeloma cells and SP2 cells, COS cells, HEK293T cells (J. Immunol. Methods (2004) 289(1-2):65-80), and a cell from a transgenic animal, e.g., a transgenic mammal. For example, the cell is a mammary epithelial cell.

[0669] In some embodiments, plasma kallikrein binding proteins are produced in a plant or cell-free based system (see e.g., Galeffi, P., et al., 2006 J Transl Med 4:39).

[0670] In addition to the nucleic acid sequence encoding the diversified immunoglobulin domain, the recombinant expression vectors may carry additional sequences, such as sequences that regulate replication of the vector in host cells (e.g., origins of replication) and selectable marker genes. The selectable marker gene facilitates selection of host cells into which the vector has been introduced (see e.g., U.S. Pat. Nos. 4,399,216, 4,634,665 and 5,179,017). For example, typically the selectable marker gene confers resistance to drugs, such as G418, hygromycin or methotrexate, on a host cell into which the vector has been introduced. Preferred selectable marker genes include the dihydrofolate reductase (DHFR) gene (for use in dhfr⁻ host cells with methotrexate selection/amplification) and the neo gene (for G418 selection).

[0671] In an exemplary system for recombinant expression of an antibody, or antigen-binding portion thereof, a recombinant expression vector encoding both the antibody heavy chain and the antibody light chain is introduced into dhfr⁻ CHO cells by calcium phosphate-mediated transfection. Within the recombinant expression vector, the antibody heavy and light chain genes are each operatively linked to enhancer/promoter regulatory elements (e.g., derived from SV40, CMV, adenovirus and the like, such as a CMV enhancer/AdMLP promoter regulatory element or an SV40 enhancer/AdMLP promoter regulatory element) to drive high levels of transcription of the genes. The recombinant expression vector also carries a DHFR gene, which allows for selection of CHO cells that have been transfected with the vector using methotrexate selection/amplification. The selected transformant host cells are cultured to allow for expression of the antibody heavy and light chains and intact antibody is recovered from the culture medium. Standard molecular biology techniques are used to prepare the recombinant expression vector, transfect the host cells, select for transformants, culture the host cells and recover the antibody from the culture medium. For example, some antibodies can be isolated by affinity chromatography with a Protein A or Protein G coupled matrix.

[0672] For antibodies that include an Fc domain, the antibody production system may produce antibodies in which the Fc region is glycosylated. For example, the Fc domain of IgG molecules is glycosylated at asparagine 297 in the CH2 domain. This asparagine is the site for modification with biantennary-type oligosaccharides. It has been demonstrated that this glycosylation is required for effector functions mediated by Fcg receptors and complement Clq (Burton and Woof, 1992, Adv. Immunol. 51:1-84; Jefferis et al., 1998, Immunol. Rev. 163:59-76). In one embodiment, the Fc domain is produced in a mammalian expression system that appropriately glycosylates the residue corresponding to asparagine 297. The Fc domain can also include other eukaryotic post-translational modifications.

[0673] Antibodies can also be produced by a transgenic animal. For example, U.S. Pat. No. 5,849,992 describes a method of expressing an antibody in the mammary gland of a transgenic mammal. A transgene is constructed that includes a milk-specific promoter and nucleic acids encoding the antibody of interest and a signal sequence for secretion. The milk produced by females of such transgenic mammals includes, secreted-therein, the antibody of interest. The antibody can be purified from the milk, or for some applications, used directly.

### Characterization of Plasma Kallikrein Binding Proteins

[0674] IC₅₀ (Inhibitory Concentration 50%) and EC₅₀ (Effective Concentration 50%). Within a series or group of binding proteins, those having lower IC₅₀ or EC₅₀ values are considered more potent inhibitors of plasma kallikrein than those binding proteins having higher IC₅₀ or EC₅₀ values. Exemplary binding proteins have an IC₅₀ value of less than 800 nM, 400 nM, 100 nM, 25 nM, 5 nM, or 1 nM, e.g., as measured in an in vitro assay for inhibition of plasma kallikrein activity when the plasma kallikrein is at 2 pM.

[0675] Plasma kallikrein binding proteins may also be characterized with reference to the activity of Factor XII and HMWK (high-molecular-weight kininogen) signaling events, e.g., the production of Factor XIIa and/or bradykinin.

[0676] The binding proteins can also be evaluated for selectivity toward plasma kallikrein. For example, a plasma kallikrein binding protein can be assayed for its potency toward plasma kallikrein and a panel of kallikreins and an IC₅₀ value or EC₅₀ value can be determined for each kallikrein. In one embodiment, a compound that demonstrates a low IC₅₀ value or EC₅₀ value for the plasma kallikrein, and a higher IC₅₀ value or EC₅₀ value, e.g., at least 2-, 5-, or 10-fold higher, for another kallikrein within the test panel is considered to be selective toward plasma kallikrein.

[0677] A pharmacokinetics study in rat, mice, or monkey can be performed with plasma kallikrein binding proteins for determining plasma kallikrein half-life in the serum. Likewise, the effect of the binding protein can be assessed in vivo, e.g., in an animal model for a disease (e.g., carrageenin-induced edema in rat hind paw (Winter et al. Proc Soc Exp Biol Med. 1962; 111:544-7)), for use as a therapeutic, for example, to treat a disease or condition described herein, e.g., a plasma kallikrein associated disorder.

### Pharmaceutical Compositions

[0678] Proteins (e.g., binding proteins) that bind to plasma kallikrein (e.g., human plasma kallikrein and/or murine plasma kallikrein) and, e.g., include at least one immunoglobin variable region can be used in methods for treating (or preventing) a plasma kallikrein associated disease or condition. The binding proteins can be present in a composition, e.g., a pharmaceutically acceptable composition or pharmaceutical composition, which includes a plasma kallikrein-binding protein, e.g., an antibody molecule or other polypeptide or peptide identified as binding to plasma kallikrein, as described herein. The plasma kallikrein binding protein can be formulated together with a pharmaceutically acceptable carrier. Pharmaceutical compositions include therapeutic compositions and diagnostic compositions, e.g., compositions that include labeled plasma kallikrein binding proteins for in vivo imaging, and compositions that include labeled plasma kallikrein binding proteins for treating (or preventing) a plasma kallikrein associated disease.

[0679] A pharmaceutically acceptable carrier includes any and all solvents, dispersion media, coatings, antibacterial and antifungal agents, isotonic and absorption delaying agents, and the like that are physiologically compatible. Preferably, the carrier is suitable for intravenous, intramuscular, subcutaneous, parenteral, spinal, or epidermal administration (e.g., by injection or infusion), although carriers suitable for inhalation and intranasal administration are also contemplated. Depending on the route of administration, the plasma kallikrein binding protein may be coated in a material to protect the compound from the action of acids and other natural conditions that may inactivate the compound.

[0680] A pharmaceutically acceptable salt is a salt that retains the desired biological activity of the compound and does not impart any undesired toxicological effects (see e.g., Berge, S. M., et al., 1977, J. Pharm. Sci. 66:1-19). Examples of such salts include acid addition salts and base addition salts. Acid addition salts include those derived from nontoxic inorganic acids, such as hydrochloric, nitric, phosphoric, sulfuric, hydrobromic, hydroiodic, phosphorous, and the like, as well as from nontoxic organic acids such as aliphatic mono- and dicarboxylic acids, phenyl-substituted alkanoic acids, hydroxy alkanoic acids, aromatic acids, aliphatic and aromatic sulfonic acids, and the like. Base addition salts include those derived from alkaline earth metals, such as sodium, potassium, magnesium, calcium, and the like, as well as from nontoxic organic amines, such as N,N′-dibenzylethylenediamine, N-methylglucamine, chloroprocaine, choline, diethanolamine, ethylenediamine, procaine, and the like.

[0681] The compositions may be in a variety of forms. These include, for example, liquid, semi-solid and solid dosage forms, such as liquid solutions (e.g., injectable and infusible solutions), dispersions or suspensions, tablets, pills, powders, liposomes and suppositories. The form can depend on the intended mode of administration and therapeutic application. Many compositions are in the form of injectable or infusible solutions, such as compositions similar to those used for administration of humans with antibodies. An exemplary mode of administration is parenteral (e.g., intravenous, subcutaneous, intraperitoneal, intramuscular). In one embodiment, the plasma kallikrein binding protein is administered by intravenous infusion or injection. In another preferred embodiment, the plasma kallikrein binding protein is administered by intramuscular or subcutaneous injection.

[0682] The phrases “parenteral administration” and “administered parenterally” as used herein means modes of administration other than enteral and topical administration, usually by injection, and includes, without limitation, intravenous, intramuscular, intraarterial, intrathecal, intracapsular, intraorbital, intracardiac, intradermal, intraperitoneal, transtracheal, subcutaneous, subcuticular, intraarticular, subcapsular, subarachnoid, intraspinal, epidural and intrasternal injection and infusion.

[0683] The composition can be formulated as a solution, microemulsion, dispersion, liposome, or other ordered structure suitable to high drug concentration. Sterile injectable solutions can be prepared by incorporating the binding protein in the required amount in an appropriate solvent with one or a combination of ingredients enumerated above, as required, followed by filtered sterilization. Generally, dispersions are prepared by incorporating the active compound into a sterile vehicle that contains a basic dispersion medium and the required other ingredients from those enumerated above. In the case of sterile powders for the preparation of sterile injectable solutions, the preferred methods of preparation are vacuum drying and freeze-drying that yields a powder of the active ingredient plus any additional desired ingredient from a previously sterile-filtered solution thereof. The proper fluidity of a solution can be maintained, for example, by the use of a coating such as lecithin, by the maintenance of the required particle size in the case of dispersion and by the use of surfactants. Prolonged absorption of injectable compositions can be brought about by including in the composition an agent that delays absorption, for example, monostearate salts and gelatin.

[0684] A plasma kallikrein binding protein can be administered by a variety of methods, although for many applications, the preferred route/mode of administration is intravenous injection or infusion. For example, for therapeutic applications, the plasma kallikrein binding protein can be administered by intravenous infusion at a rate of less than 30, 20, 10, 5, or 1 mg/min to reach a dose of about 1 to 100 mg/m² or 7 to 25 mg/m². The route and/or mode of administration will vary depending upon the desired results. In certain embodiments, the active compound may be prepared with a carrier that will protect the compound against rapid release, such as a controlled release formulation, including implants, and microencapsulated delivery systems. Biodegradable, biocompatible polymers can be used, such as ethylene vinyl acetate, polyanhydrides, polyglycolic acid, collagen, polyorthoesters, and polylactic acid. Many methods for the preparation of such formulations are available. See, e.g., Sustained and Controlled Release Drug Delivery Systems, J.R. Robinson, ed., 1978, Marcel Dekker, Inc., New York.

[0685] Pharmaceutical compositions can be administered with medical devices. For example, in one embodiment, a pharmaceutical composition disclosed herein can be administered with a device, e.g., a needleless hypodermic injection device, a pump, or implant.

[0686] In certain embodiments, a plasma kallikrein binding protein can be formulated to ensure proper distribution in vivo. For example, the blood-brain barrier (BBB) excludes many highly hydrophilic compounds. To ensure that the therapeutic compounds disclosed herein cross the BBB (if desired), they can be formulated, for example, in liposomes. For methods of manufacturing liposomes, see, e.g., U.S. Pat. Nos. 4,522,811; 5,374,548; and 5,399,331. The liposomes may comprise one or more moieties that are selectively transported into specific cells or organs, thus enhance targeted drug delivery (see, e.g., V. V. Ranade, 1989, J. Clin. Pharmacol. 29:685).

[0687] Dosage regimens are adjusted to provide the optimum desired response (e.g., a therapeutic response). For example, a single bolus may be administered, several divided doses may be administered over time or the dose may be proportionally reduced or increased as indicated by the exigencies of the therapeutic situation. It is especially advantageous to formulate parenteral compositions in dosage unit form for ease of administration and uniformity of dosage. Dosage unit form as used herein refers to physically discrete units suited as unitary dosages for the subjects to be treated; each unit contains a predetermined quantity of active compound calculated to produce the desired therapeutic effect in association with the required pharmaceutical carrier. The specification for the dosage unit forms can be dictated by and directly dependent on (a) the unique characteristics of the active compound and the particular therapeutic effect to be achieved, and (b) the limitations inherent in the art of compounding such an active compound for the treatment of sensitivity in individuals.

[0688] An exemplary, non-limiting range for a therapeutically or prophylactically effective amount of a binding protein (e.g., an antibody) disclosed herein is 0.1-20 mg/kg, more preferably 1-10 mg/kg. An anti-plasma kallikrein antibody can be administered, e.g., by intravenous infusion, e.g., at a rate of less than 30, 20, 10, 5, or 1 mg/min to reach a dose of about 1 to 100 mg/m² or about 5 to 30 mg/m². For binding proteins smaller in molecular weight than an antibody, appropriate amounts can be proportionally less. Dosage values may vary with the type and severity of the condition to be alleviated. For a particular subject, specific dosage regimens can be adjusted over time according to the individual need and the professional judgment of the person administering or supervising the administration of the compositions.

[0689] The pharmaceutical compositions disclosed herein may include a “therapeutically effective amount” or a “prophylactically effective amount” of a plasma kallikrein binding protein disclosed herein. A “therapeutically effective amount” refers to an amount effective, at dosages and for periods of time necessary, to achieve the desired therapeutic result. A therapeutically effective amount of the composition may vary according to factors such as the disease state, age, sex, and weight of the individual, and the ability of the protein to elicit a desired response in the individual. A therapeutically effective amount is also one in which any toxic or detrimental effects of the composition are outweighed by the therapeutically beneficial effects.

[0690] A “therapeutically effective dosage” preferably modulates a measurable parameter, e.g., levels of circulating IgG antibodies by a statistically significant degree or at least about 20%, more preferably by at least about 40%, even more preferably by at least about 60%, and still more preferably by at least about 80% relative to untreated subjects. The ability of a compound to modulate a measurable parameter, e.g., a disease-associated parameter, can be evaluated in an animal model system predictive of efficacy in human disorders and conditions, e.g., a plasma kallikrein associated disease. Alternatively, this property of a composition can be evaluated by examining the ability of the compound to modulate a parameter in vitro.

[0691] A “prophylactically effective amount” refers to an amount effective, at dosages and for periods of time necessary, to achieve the desired prophylactic result. Typically, because a prophylactic dose is used in subjects prior to or at an earlier stage of disease, the prophylactically effective amount will be less than the therapeutically effective amount.

### Stabilization and Retention

[0692] In one embodiment, a plasma kallikrein binding protein is physically associated with a moiety that improves its stabilization and/or retention in circulation, e.g., in blood, serum, lymph, or other tissues, e.g., by at least 1.5, 2, 5, 10, or 50 fold. For example, a plasma kallikrein binding protein can be associated with a polymer, e.g., a substantially non-antigenic polymer, such as polyalkylene oxides or polyethylene oxides. Suitable polymers will vary substantially by weight. Polymers having molecular number average weights ranging from about 200 to about 35,000 (or about 1,000 to about 15,000, and 2,000 to about 12,500) can be used. For example, a plasma kallikrein binding protein can be conjugated to a water soluble polymer, e.g., hydrophilic polyvinyl polymers, e.g., polyvinylalcohol and polyvinylpyrrolidone. A non-limiting list of such polymers include polyalkylene oxide homopolymers such as polyethylene glycol (PEG) or polypropylene glycols, polyoxyethylenated polyols, copolymers thereof and block copolymers thereof, provided that the water solubility of the block copolymers is maintained.

[0693] A plasma kallikrein binding protein can also be associated with a carrier protein, e.g., a serum albumin, such as a human serum albumin (see e.g., Smith, B J. et al., 2001 Bioconjug Chem 12(5): 750-756). For example, a translational fusion can be used to associate the carrier protein with the plasma kallikrein binding protein.

[0694] A plasma kallikrein binding protein can also be modified as a HESylation derivative. Processes for HESylation of a plasma kallikrein binding protein utilize hydroxyethyl starch to modify the protein. HESylation of a protein can extend the circulating half-life of the protein and also reduce renal clearance.

### Kits

[0695] A plasma kallikrein binding protein described herein can be provided in a kit, e.g., as a component of a kit. For example, the kit includes (a) a plasma kallikrein binding protein, e.g., a composition (e.g., a pharmaceutical composition) that includes a plasma kallikrein binding protein, and, optionally (b) informational material. The informational material can be descriptive, instructional, marketing or other material that relates to a method described herein and/or the use of a plasma kallikrein binding protein, e.g., for a method described herein.

[0696] The informational material of the kit is not limited in its form. In one embodiment, the informational material can include information about production of the compound, molecular weight of the compound, concentration, date of expiration, batch or production site information, and so forth. In one embodiment, the informational material relates to using the binding protein to treat, prevent, or diagnosis of disorders and conditions, e.g., a plasma kallikrein associated disease or condition.

[0697] In one embodiment, the informational material can include instructions to administer a plasma kallikrein binding protein in a suitable manner to perform the methods described herein, e.g., in a suitable dose, dosage form, or mode of administration (e.g., a dose, dosage form, or mode of administration described herein). In another embodiment, the informational material can include instructions to administer a plasma kallikrein binding protein to a suitable subject, e.g., a human, e.g., a human having, or at risk for, a disorder or condition described herein, e.g., a plasma kallikrein associated disease or condition. For example, the material can include instructions to administer a plasma kallikrein binding protein to a patient with a disorder or condition described herein, e.g., a plasma kallikrein associated disease. The informational material of the kits is not limited in its form. In many cases, the informational material, e.g., instructions, is provided in print but may also be in other formats, such as computer readable material.

[0698] A plasma kallikrein binding protein can be provided in any form, e.g., liquid, dried or lyophilized form. It is preferred that a plasma kallikrein binding protein be substantially pure and/or sterile. When a plasma kallikrein binding protein is provided in a liquid solution, the liquid solution preferably is an aqueous solution, with a sterile aqueous solution being preferred. When a plasma kallikrein binding protein is provided as a dried form, reconstitution generally is by the addition of a suitable solvent. The solvent, e.g., sterile water or buffer, can optionally be provided in the kit.

[0699] The kit can include one or more containers for the composition containing a plasma kallikrein binding protein. In some embodiments, the kit contains separate containers, dividers or compartments for the composition and informational material. For example, the composition can be contained in a bottle, vial, or syringe, and the informational material can be contained in association with the container. In other embodiments, the separate elements of the kit are contained within a single, undivided container. For example, the composition is contained in a bottle, vial or syringe that has attached thereto the informational material in the form of a label. In some embodiments, the kit includes a plurality (e.g., a pack) of individual containers, each containing one or more unit dosage forms (e.g., a dosage form described herein) of a plasma kallikrein binding protein. For example, the kit includes a plurality of syringes, ampules, foil packets, or blister packs, each containing a single unit dose of a plasma kallikrein binding protein. The containers of the kits can be air tight, waterproof (e.g., impermeable to changes in moisture or evaporation), and/or light-tight.

[0700] The kit optionally includes a device suitable for administration of the composition, e.g., a syringe, inhalant, dropper (e.g., eye dropper), swab (e.g., a cotton swab or wooden swab), or any such delivery device. In one embodiment, the device is an implantable device that dispenses metered doses of the binding protein. The disclosure also features a method of providing a kit, e.g., by combining components described herein.

### Treatments

[0701] Proteins that bind to plasma kallikrein, e.g., as described herein, have therapeutic and prophylactic utilities, particularly in human subjects. These binding proteins are administered to a subject to treat, prevent, and/or diagnose a variety of disorders and conditions, including e.g., a plasma kallikrein associated disease, or even to cells in culture, e.g., in vitro or ex vivo. For example, these binding proteins can be used to modify the effects of plasma kallikrein released from cells in culture (Lilla et al., J Biol Chem. 284(20):13792-13803 (2009)). Treating includes administering an amount effective to alleviate, relieve, alter, remedy, ameliorate, improve or affect the disorder, the symptoms of the disorder or the predisposition toward the disorder. The treatment may also delay onset, e.g., prevent onset, or prevent deterioration of a disease or condition.

[0702] As used herein, an amount of a target-binding agent effective to prevent a disorder, or a prophylactically effective amount of the binding agent refers to an amount of a target binding agent, e.g., an plasma kallikrein binding protein, e.g., an anti-plasma kallikrein antibody described herein, which is effective, upon single- or multiple-dose administration to the subject, for preventing or delaying the occurrence of the onset or recurrence of a disorder, e.g., a disorder described herein, e.g., a plasma kallikrein associated disease.

[0703] Methods of administering plasma kallikrein binding proteins and other agents are also described in “Pharmaceutical Compositions.” Suitable dosages of the molecules used can depend on the age and weight of the subject and the particular drug used. The binding proteins can be used as competitive agents to inhibit, reduce an undesirable interaction, e.g., between plasma kallikrein and its substrate (e.g., Factor XII or HMWK). The dose of the plasma kallikrein binding protein can be the amount sufficient to block 90%, 95%, 99%, or 99.9% of the activity of plasma kallikrein in the patient, especially at the site of disease. Depending on the disease, this may require 0.1, 1.0, 3.0, 6.0, or 10.0 mg/Kg. For an IgG having a molecular mass of 150,000 g/mole (two binding sites), these doses correspond to approximately 18 nM, 180 nM, 540 nM, 1.08 μM, and 1.8 μM of binding sites for a 5 L blood volume.

[0704] In one embodiment, the plasma kallikrein binding proteins are used to inhibit an activity (e.g., inhibit at least one activity of plasma kallikrein, e.g., reduce Factor XIIa and/or bradykinin production) of plasma kallikrein, e.g., in vivo. The binding proteins can be used by themselves or conjugated to an agent, e.g., a cytotoxic drug, cytotoxin enzyme, or radioisotope. This method includes: administering the binding protein alone or attached to an agent (e.g., a cytotoxic drug), to a subject requiring such treatment. For example, plasma kallikrein binding proteins that do not substantially inhibit plasma kallikrein may be used to deliver nanoparticles containing agents, such as toxins, to plasma kallikrein associated cells or tissues, e.g., to treat a plasma kallikrein-associate disorder.

[0705] Because the plasma kallikrein binding proteins recognize plasma kallikrein expressing cells and can bind to cells that are associated with (e.g., in proximity of or intermingled with) a plasma kallikrein associated disorder or condition, plasma kallikrein binding proteins can be used to inhibit an activity (e.g., inhibit at least one activity of plasma kallikrein, e.g., reduce Factor XIIa and/or bradykinin production) any such cells and inhibit the plasma kallikrein associated disease. Reducing plasma kallikrein activity can indirectly inhibit cells which may be dependent on the plasma kallikrein activity for the development and/or progression of a plasma kallikrein-associated disorder.

[0706] The binding proteins may be used to deliver an agent (e.g., any of a variety of cytotoxic and therapeutic drugs) to cells and tissues where plasma kallikrein is present. Exemplary agents include a compound emitting radiation, molecules of plants, fungal, or bacterial origin, biological proteins, and mixtures thereof. The cytotoxic drugs can be intracellularly acting cytotoxic drugs, such as toxins short range radiation emitters, e.g., short range, high energy α-emitters.

[0707] To target plasma kallikrein expressing cells, a prodrug system can be used. For example, a first binding protein is conjugated with a prodrug which is activated only when in close proximity with a prodrug activator. The prodrug activator is conjugated with a second binding protein, preferably one which binds to a non competing site on the target molecule. Whether two binding proteins bind to competing or non competing binding sites can be determined by conventional competitive binding assays. Exemplary drug prodrug pairs are described in Blakely et al., (1996) Cancer Research, 56:3287 3292.

[0708] The plasma kallikrein binding proteins can be used directly in vivo to eliminate antigen-expressing cells via natural complement-dependent cytotoxicity (CDC) or antibody dependent cellular cytotoxicity (ADCC). The binding proteins described herein can include complement binding effector domain, such as the Fc portions from IgG1, -2, or -3 or corresponding portions of IgM which bind complement. In one embodiment, a population of target cells is ex vivo treated with a binding agent described herein and appropriate effector cells. The treatment can be supplemented by the addition of complement or serum containing complement. Further, phagocytosis of target cells coated with a binding protein described herein can be improved by binding of complement proteins. In another embodiment target, cells coated with the binding protein which includes a complement binding effector domain are lysed by complement.

[0709] Methods of administering plasma kallikrein binding proteins are described in “Pharmaceutical Compositions.” Suitable dosages of the molecules used will depend on the age and weight of the subject and the particular drug used. The binding proteins can be used as competitive agents to inhibit or reduce an undesirable interaction, e.g., between a natural or pathological agent and the plasma kallikrein.

[0710] The plasma kallikrein binding protein can be used to deliver macro and micromolecules, e.g., a gene into the cell for gene therapy purposes into the endothelium or epithelium and target only those tissues expressing the plasma kallikrein. The binding proteins may be used to deliver a variety of cytotoxic drugs including therapeutic drugs, a compound emitting radiation, molecules of plants, fungal, or bacterial origin, biological proteins, and mixtures thereof. The cytotoxic drugs can be intracellularly acting cytotoxic drugs, such as short range radiation emitters, including, for example, short range, high energy cc emitters, as described herein.

[0711] In the case of polypeptide toxins, recombinant nucleic acid techniques can be used to construct a nucleic acid that encodes the binding protein (e.g., antibody or antigen-binding fragment thereof) and the cytotoxin (or a polypeptide component thereof) as translational fusions. The recombinant nucleic acid is then expressed, e.g., in cells and the encoded fusion polypeptide isolated.

[0712] Alternatively, the plasma kallikrein binding protein can be coupled to high energy radiation emitters, for example, a radioisotope, such as ¹³¹I, a γ-emitter, which, when localized at a site, results in a killing of several cell diameters. See, e.g., S. E. Order, “Analysis, Results, and Future Prospective of the Therapeutic Use of Radiolabeled Antibody in Cancer Therapy”, Monoclonal Antibodies for Cancer Detection and Therapy, R. W. Baldwin et al. (eds.), pp 303 316 (Academic Press 1985). Other suitable radioisotopes include a emitters, such as ²¹²Bi, ²¹³Bi, and ²¹¹At, and b emitters, such as ¹⁸⁶Re and ⁹⁰Y. Moreover, ¹⁷⁷Lu may also be used as both an imaging and cytotoxic agent.

[0713] Radioimmunotherapy (RIT) using antibodies labeled with ¹³¹I, ⁹⁰Y and ¹⁷⁷Lu is under intense clinical investigation. There are significant differences in the physical characteristics of these three nuclides and as a result, the choice of radionuclide is very critical in order to deliver maximum radiation dose to a tissue of interest. The higher beta energy particles of ⁹⁰Y may be good for bulky tumors. The relatively low energy beta particles of ¹³¹I are ideal, but in vivo dehalogenation of radioiodinated molecules is a major disadvantage for internalizing antibody. In contrast, ¹⁷⁷Lu has low energy beta particle with only 0.2-0.3 mm range and delivers much lower radiation dose to bone marrow compared to ⁹⁰Y. In addition, due to longer physical half-life (compared to ⁹⁰Y), the residence times are higher. As a result, higher activities (more mCi amounts) of ¹⁷⁷Lu labeled agents can be administered with comparatively less radiation dose to marrow. There have been several clinical studies investigating the use of ¹⁷⁷Lu labeled antibodies in the treatment of various cancers. (Mulligan T et al., 1995, Clin. Canc. Res. 1: 1447-1454; Meredith R F, et al., 1996, J. Nucl. Med. 37:1491-1496; Alvarez R D, et al., 1997, Gynecol. Oncol. 65: 94-101).

### Exemplary Diseases and Conditions

[0714] A plasma kallikrein binding protein described herein is useful to treat (or prevent) a disease or condition in which plasma kallikrein activity is implicated, e.g., a disease or condition described herein, or to treat (or prevent) one or more symptoms associated therewith. In some embodiments, the plasma kallikrein binding protein (e.g., plasma kallikrein binding IgG or Fab) inhibits plasma kallikrein activity.

[0715] Examples of such diseases and conditions which can be treated (or prevented) by a plasma kallikrein binding protein described herein include: rheumatoid arthritis, gout, intestinal bowel disease, oral mucositis, neuropathic pain, inflammatory pain, spinal stenosis-degenerative spine disease, arterial or venous thrombosis, post operative ileus, aortic aneurysm, osteoarthritis, vasculitis, edema, hereditary angioedema, cerebral edema, pulmonary embolism, stroke, clotting induced by ventricular assistance devices or stents, head trauma or peri-tumor brain edema, sepsis, acute middle cerebral artery (MCA) ischemic event (stroke), restenosis (e.g., after angioplasty), systemic lupus erythematosis nephritis, and burn injury. A plasma kallikrein binding protein described herein can also be used to promote wound healing. A plasma kallikrein binding protein described herein can also be used as an oncology treatment by mechanisms that include, but are not limited to, blocking production of pro-angiogenic bradykinin.

[0716] A therapeutically effective amount of a plasma kallikrein binding protein can be administered to a subject having or suspected of having a disorder in which plasma kallikrein activity is implicated, thereby treating (e.g., ameliorating or improving a symptom or feature of a disorder, slowing, stabilizing and/or halting disease progression) the disorder.

[0717] The plasma kallikrein binding protein can be administered in a therapeutically effective amount. A therapeutically effective amount of a plasma kallikrein binding protein is the amount which is effective, upon single or multiple dose administration to a subject, in treating a subject, e.g., curing, alleviating, relieving or improving at least one symptom of a disorder in a subject to a degree beyond that expected in the absence of such treatment. A therapeutically effective amount of the composition may vary according to factors such as the disease state, age, sex, and weight of the individual, and the ability of the compound to elicit a desired response in the individual. A therapeutically effective amount is also one in which any toxic or detrimental effects of the composition are outweighed by the therapeutically beneficial effects. A therapeutically effective dosage preferably modulates a measurable parameter, favorably, relative to untreated subjects. The ability of a compound to affect (e.g., inhibit) a measurable parameter can be evaluated in an animal model system predictive of efficacy in a human disorder.

[0718] Dosage regimens can be adjusted to provide the optimum desired response (e.g., a therapeutic response). For example, a single bolus may be administered, several divided doses may be administered over time or the dose may be proportionally reduced or increased as indicated by the exigencies of the therapeutic situation. It is especially advantageous to formulate parenteral compositions in dosage unit form for ease of administration and uniformity of dosage. Dosage unit form as used herein refers to physically discrete units suited as unitary dosages for the subjects to be treated; each unit contains a predetermined quantity of active compound calculated to produce the desired therapeutic effect in association with the required pharmaceutical carrier.

### Rheumatoid Arthritis

[0719] Rheumatoid arthritis (RA) is an autoimmune, chronic inflammatory disease that causes joint swelling and pain and normally results in joint destruction. RA generally follows a relapsing/remitting course, with “flares” of disease activity interspersed with remissions of disease symptoms. RA is associated with a number of additional inflammatory disorders, including Sjogren's syndrome (dry eyes and mouth caused by inflammation of tear and saliva glands), pleuritis (inflammation of the pleura that causes pain upon deep breath and coughing), rheumatoid nodules (nodular sites of inflammation that develop within the lungs), pericarditis (inflammation of the pericardium that causes pain when lying down or leaning forward), Felty syndrome (splenomegaly and leucopenia observed in conjunction with RA, making the subject prone to infection), and vasculitis (an inflammation of the blood vessels which can block blood flow). Plasma kallikrein has been implicated in rheumatoid arthritis.

[0720] Symptoms of active RA include fatigue, lack of appetite, low grade fever, muscle and joint aches, and stiffness. Muscle and joint stiffness are usually most notable in the morning and after periods of inactivity. During flares, joints frequently become red, swollen, painful, and tender, generally as a consequence of synovitis.

[0721] Treatment for rheumatoid arthritis involves a combination of medications, rest, joint strengthening exercises, and joint protection. Two classes of medications are used in treating rheumatoid arthritis: anti-inflammatory “first-line drugs,” and “Disease-Modifying Antirheumatic Drugs” (DMARDs). The first-line drugs include NSAIDS (e.g., aspirin, naproxen, ibuprofen, and etodolac) and cortisone (corticosteroids). DMARDs, such as gold (e.g., gold salts, gold thioglucose, gold thiomalate, oral gold), methotrexate, sulfasalazine, D-penicillamine, azathioprine, cyclophosphamide, chlorambucil, and cyclosporine, leflunomide, etanercept, infliximab, anakinra, and adalimumab, and hydroxychloroquine, promote disease remission and prevent progressive joint destruction, but they are not anti-inflammatory agents.

[0722] The disclosure provides methods of treating (e.g., ameliorating, stabilizing, or eliminating one or more symptoms or ameliorating or stabilizing the subject's score on a RA scale) rheumatoid arthritis by administering a plasma kallikrein binding protein (e.g., a therapeutically effective amount of a plasma kallikrein binding protein) to a subject having or suspected of having RA. Additionally provided are methods of treating RA by administering a plasma kallikrein binding protein (e.g., a therapeutically effective amount of a plasma kallikrein binding protein) in combination with a second therapy, e.g., with at least one anti-inflammatory “first line drug” (e.g., an NSAID and/or cortisone) and/or a DMARD. The disclosure also provides methods of preventing rheumatoid arthritis or a symptom thereof by administering a plasma kallikrein binding protein (e.g., a prophylactically effective amount of a plasma kallikrein binding protein) to a subject at risk of developing RA (e.g., a subject having a family member with RA or a genetic predisposition thereto).

[0723] Further provided are methods of treating (e.g., ameliorating, stabilizing, or eliminating one or more symptoms) rheumatoid arthritis associated disorders (Sjogren's syndrome, pleuritis, pulmonary rheumatoid nodules, pericarditis, Felty syndrome, and vasculitis) by administering a plasma kallikrein binding protein (e.g., a therapeutically effective amount of a plasma kallikrein binding protein) to a subject having or suspected of having RA.

[0724] Scales useful for assessing RA and symptoms of RA include, e.g., the Rheumatoid Arthritis Severity Scale (RASS; Bardwell et al., (2002) Rheumatology 41(1):38-45), SF-36 Arthritis Specific Health Index (ASHI; Ware et al., (1999) Med. Care. 37(5 Suppl):MS40-50), Arthritis Impact Measurement Scales or Arthritis Impact Measurement Scales 2 (AIMS or AIMS2; Meenan et al. (1992) Arthritis Rheum. 35(1):1-10); the Stanford Health Assessment Questionnaire (HAQ), HAQII, or modified HAQ (see, e.g., Pincus et al. (1983) Arthritis Rheum. 26(11):1346-53).

[0725] Guidance for the determination of the dosage that delivers a therapeutically effective amount of a plasma kallikrein binding protein may be obtained from animal models of rheumatoid arthritis, such as collagen-induced arthritis (CIA), which is induced, typically in rodents, by immunization with autologous or heterologous type II collagen in adjuvant (Williams et al. Methods Mol Med. 98:207-16 (2004)).

### Gout

[0726] Gout is a condition that results from crystals of uric acid depositing in tissues of the body. Gout is characterized by an overload of uric acid in the body and recurring attacks of joint inflammation (arthritis). Chronic gout can lead to deposits of hard lumps of uric acid in and around the joints, decreased kidney function, and kidney stones. Gout is often related to an inherited abnormality in the body's ability to process uric acid. Uric acid is a breakdown product of purines, which are part of many foods. An abnormality in handling uric acid can cause attacks of painful arthritis (gout attack), kidney stones, and blockage of the kidney filtering tubules with uric acid crystals, leading to kidney failure. Some patients may only develop elevated blood uric acid levels (hyperuricemia) without having arthritis or kidney problems.

[0727] Symptoms of gout include, e.g., excruciating and unexpected pain, swelling, redness, warmth and stiffness in the affected foot or other parts of the body, and low-grade fever.

[0728] Treatments for gout include, e.g., nonsteroidal anti-inflammatory drugs (NSAIDs), colchicine and oral glucocorticoids, intra-articular glucocorticoids administered via a joint injection, xanthine oxidase inhibitors (e.g., allopurinol, febuxostat), uricosurics (e.g., probenecid, EDTA), urate oxidases (e.g., pegloticase), sodium bicarbonate, and low purine diet.

[0729] The disclosure provides methods of treating (e.g., ameliorating, stabilizing, or eliminating one or more symptoms or the worsening of) gout by administering a plasma kallikrein binding protein (e.g., a therapeutically effective amount of a plasma kallikrein binding protein) to a subject having or suspected of having gout. Additionally provided are methods of treating gout by administering a plasma kallikrein binding protein (e.g., a therapeutically effective amount of a kallikrein binding protein) in combination with a second therapy, e.g., an NSAID, a colchicine, an oral glucocorticoid, an intra-articular glucocorticoid administered via a joint injection, a xanthine oxidase inhibitor (e.g., allopurinol, febuxostat), a uricosuric (e.g., probenecid, EDTA), a urate oxidase (e.g., pegloticase), sodium bicarbonate, and/or low purine diet. The disclosure also provides methods of preventing gout or a symptom thereof by administering a plasma kallikrein binding protein (e.g., a prophylactically effective amount of a plasma kallikrein binding protein) to a subject at risk of developing gout (e.g., a subject having a family member with gout or a genetic predisposition thereto).

[0730] Guidance for the determination of the dosage that delivers a therapeutically effective amount of a plasma kallikrein binding protein may be obtained from animal models of gout, see, e.g., Reginato and Olsen, Curr Opin Rheumatol. 19(2):134-45 (2007) and references cited therein.

### Intestinal Bowel Disease (IBD)

[0731] Inflammatory bowel disease (IBD) is a group of inflammatory conditions of the large intestine and, in some cases, the small intestine. The main forms of IBD are Crohn's disease and ulcerative colitis (UC). Accounting for far fewer cases are other forms of IBD: collagenous colitis, lymphocytic colitis, ischaemic colitis, diversion colitis, Behcet's syndrome, infective colitis, and indeterminate colitis. The main difference between Crohn's disease and UC is the location and nature of the inflammatory changes. Crohn's can affect any part of the gastrointestinal tract, from mouth to anus (skip lesions), although a majority of the cases start in the terminal ileum. Ulcerative colitis, in contrast, is restricted to the colon and the rectum. Microscopically, ulcerative colitis is restricted to the mucosa (epithelial lining of the gut), while Crohn's disease affects the whole bowel wall. Finally, Crohn's disease and ulcerative colitis present with extra-intestinal manifestations (such as liver problems, arthritis, skin manifestations and eye problems) in different proportions.

[0732] Symptoms of IBD include abdominal pain, vomiting, diarrhea, hematochezia, weight loss, weight gain and various associated complaints or diseases (arthritis, pyoderma gangrenosum, primary sclerosing cholangitis). Diagnosis is generally by colonoscopy with biopsy of pathological lesions. Rarely, a definitive diagnosis of neither Crohn's disease nor ulcerative colitis can be made because of idiosyncrases in the presentation. In this case, a diagnosis of indeterminate colitis may be made.

[0733] Treatment for IBD, depending on the level of severity, may require immunosuppression to control the symptoms. Immunosuppresives such as azathioprine, methotrexate, or 6-mercaptopurine can be used. More commonly, treatment of IBD requires a form of mesalamine. Often, steroids are used to control disease flares and were once acceptable as a maintenance drug. Biologicals, such as infliximab, have been used to treat patients with Crohn's disease or Ulcerative Colitis. Severe cases may require surgery, such as bowel resection, strictureplasty or a temporary or permanent colostomy or ileostomy. Alternative medicine treatments for IBD exist in various forms however such methods concentrate on controlling underlying pathology in order to avoid prolonged steroidal exposure or surgical excision. Usually the treatment is started by administering drugs, such as prednisone, with high anti-inflammatory affects. Once the inflammation is successfully controlled, the patient is usually switched to a lighter drug, such as asacol—a mesalamine—to keep the disease in remission. If unsuccessful, a combination of the aforementioned immunosuppressant drugs with a mesalamine (which may also have an anti-inflammatory effect) may or may not be administered, depending on the patient.

[0734] The disclosure provides methods of treating (e.g., ameliorating, stabilizing, or eliminating one or more symptoms of) IBD by administering a plasma kallikrein binding protein (e.g., a therapeutically effective amount of a plasma kallikrein binding protein) to a subject having or suspected of having IBD. Additionally provided are methods of treating IBD by administering a plasma kallikrein binding protein (e.g., a therapeutically effective amount of a kallikrein binding protein) in combination with a second therapy, e.g., an immunosuppressive (e.g., azathioprine, methotrexate, 6-mercaptopurine), a mesalamine, a steroid, and/or infliximab. The disclosure also provides methods of preventing IBD or a symptom thereof by administering a plasma kallikrein binding protein (e.g., a prophylactically effective amount of a plasma kallikrein binding protein) to a subject at risk of developing IBD (e.g., a subject having a family member with IBD or a genetic predisposition thereto).

[0735] Guidance for the determination of the dosage that delivers a therapeutically effective amount of a plasma kallikrein binding protein may be obtained from animal models of IBD, see, e.g., those described in U.S. Pat. No. 6,114,382, WO 2004/071186, and references cited therein.

### Oral Mucositis

[0736] Oral mucositis is the painful inflammation and ulceration of the mucous membranes in the mouth, usually as an adverse effect of chemotherapy and radiotherapy treatment for cancer.

[0737] Symptoms of oral mucositis include, e.g., ulcers, peripheral erythema, burning sensation accompanied by reddening, trouble speaking, eating, or even opening the mouth, and dyseusia (alteration in taste perception).

[0738] Treatment for oral mucositis includes oral hygiene (salt mouthwash, GELCLAIR®, CAPHOSOL®, MUGARD®), palifermin (a human keratinocyte growth factor), cytokines and other modifiers of inflammation (e.g., IL-1, IL-11, TGF-beta3), amino acid supplementation (e.g., glutamine), vitamins, colony-stimulating factors, cryotherapy, and laser therapy.

[0739] The disclosure provides methods of treating (e.g., ameliorating, reducing, or eliminating one or more symptoms, or stabilizing the subject's score on a mucositis scale) oral mucositis by administering a plasma kallikrein binding protein (e.g., a therapeutically effective amount of a plasma kallikrein binding protein) to a subject having or suspected of having oral mucositis. Additionally provided are methods of treating oral mucositis by administering a plasma kallikrein binding protein (e.g., a therapeutically effective amount of a plasma kallikrein binding protein) in combination with a second therapy, e.g., oral hygiene (salt mouthwash, GELCLAIR®, CAPHOSOL®, MUGARD®), palifermin (a human keratinocyte growth factor), a cytokine and/or a modifier of inflammation (e.g., IL-1, IL-11, TGF-beta3), an amino acid supplementation (e.g., glutamine), a vitamin, a colony-stimulating factor, cryotherapy, and/or laser therapy. The disclosure also provides methods of preventing oral mucositis or a symptom thereof by administering a plasma kallikrein binding protein (e.g., a prophylactically effective amount of a plasma kallikrein binding protein) to a subject at risk of developing oral mucositis (e.g., a subject that has undergone or is undergoing chemotherapy or radiotherapy).

[0740] Scales useful for assessing oral mucositis include the World Health Organization (WHO) Oral Toxicity score (Handbook for reporting results of cancer treatment. Geneva, Switzerland: World Health Organization; 1979:15-22), National Cancer Institute Common Toxicity Criteria (NCI-CTC) for Oral Mucositis (National Cancer Institute Common Toxicity Criteria. Version 2.0, Jun. 1, 1999, Sonis et al., Cancer. 85:2103-2113 (1999)), and Oral Mucositis Assessment Scale (OMAS).

[0741] Guidance for the determination of the dosage that delivers a therapeutically effective amount of a plasma kallikrein binding protein may be obtained from animal models of oral mucositis, such as an animal model of oral mucositis induced by conditioning regimen of haematopoietic stem cell transplantation (Chen et al., Zhonghua Kou Qiang Yi Xue Za Zhi. 42(11):672-6 (2007)).

### Neuropathic Pain

[0742] Neuropathic pain is a complex, chronic pain state that usually is accompanied by tissue injury. With neuropathic pain, the nerve fibers themselves may be damaged, dysfunctional or injured. These damaged nerve fibers send incorrect signals to other pain centers. The impact of nerve fiber injury includes a change in nerve function both at the site of injury and areas around the injury.

[0743] Symptoms of neuropathic pain include, e.g., shooting and burning pain and tingling and numbness.

[0744] Treatments for neuropathic pain include, e.g., medications (e.g., non-steroidal anti-inflammatory drugs (NSAIDs) (e.g., ALEVE®, MOTRIN®, or morphine), anticonvulsant, and antidepressant drugs), and invasive or implantable devices (e.g., electrical stimulation).

[0745] The disclosure provides methods of treating (e.g., ameliorating, reducing, or eliminating one or more symptoms of or stabilizing the subject's score on a pain scale) neuropathic pain by administering a plasma kallikrein binding protein (e.g., a therapeutically effective amount of a plasma kallikrein binding protein) to a subject having or suspected of having neuropathic pain. Additionally provided are methods of treating neuropathic pain by administering a plasma kallikrein binding protein (e.g., a therapeutically effective amount of a plasma kallikrein binding protein) in combination with a second therapy, e.g., a nonsurgical treatment ((e.g., a non-steroidal anti-inflammatory drug (NSAID) (e.g., ALEVE®, MOTRIN®, or morphine), an anticonvulsant, and/or an antidepressant drug), and/or an invasive or implantable device (e.g., electrical stimulation). The disclosure also provides methods of preventing neuropathic pain or a symptom thereof by administering a plasma kallikrein binding protein (e.g., a prophylactically effective amount of a plasma kallikrein binding protein) to a subject at risk of developing neuropathic pain (e.g., a subject that has experienced tissue injury).

[0746] Scales useful for the assessment of neuropathic pain include, e.g., Wong-Baker FACES Pain Rating Scale (Wong-Baker FACES Pain Rating Scale Foundation), Visual analog scale (VAS) (Huskisson, J. Rheumatol. 9 (5): 768-9 (1982)), McGill Pain Questionnaire (MPQ) (Melzack, Pain 1 (3): 277-99 (1975)), Descriptor differential scale (DDS) (Gracety and Kwilosz, Pain 35 (3): 279-88 (1988)), Faces Pain Scale-Revised (FPS-R) (Hicks et al., Pain 93 (2): 173-83 (2001)), Numerical 11 point box (BS-11) (Jensen et al., Clin J Pain 5 (2): 153-9 (1989)), Numeric Rating Scale (NRS-11) (Hartrick et al., Pain Pract 3 (4): 310-6 (2003)), Dolorimeter Pain Index (DPI) (Hardy et al., (1952). Pain Sensations and Reactions. Baltimore: The Williams & Wilkins Co.), and Brief Pain Inventory (BPI) (Cleeland and Ryan Ann. Acad. Med. Singap. 23 (2): 129-38 (1994)).

[0747] Guidance for the determination of the dosage that delivers a therapeutically effective amount of a plasma kallikrein binding protein may be obtained from animal models of neuropathic pain, see, e.g., those described in Martin et al., Methods Mol Med. 84:233-42 (2003) and references cited therein.

### Inflammatory Pain

[0748] Inflammatory pain is caused by an insult such as penetration wounds, burns, extreme cold, fractures, arthritis, autoimmune conditions, excessive stretching, infections and vasoconstriction to the integrity of tissues at a cellular level. During inflammation a complex neuro-immune interaction results in primary hyperalgesia, in which a large range of inflammatory molecules including prostaglandins and bradykinin induce and maintain the altered nociceptor sensitivity.

[0749] Treatments for inflammatory pain include, e.g., non-steroidal anti-inflammatory drugs (NSAIDs) and corticosteroids.

[0750] The disclosure provides methods of treating (e.g., ameliorating, reducing, or eliminating one or more symptoms of) inflammatory pain by administering a plasma kallikrein binding protein (e.g., a therapeutically effective amount of a plasma kallikrein binding protein) to a subject having or suspected of having inflammatory pain. Additionally provided are methods of treating inflammatory pain by administering a plasma kallikrein binding protein (e.g., a therapeutically effective amount of a plasma kallikrein binding protein) in combination with a second therapy, e.g., a non-steroidal anti-inflammatory drug (NSAID) and/or a corticosteroid. The disclosure also provides methods of preventing inflammatory pain or a symptom thereof by administering a plasma kallikrein binding protein (e.g., a prophylactically effective amount of a plasma kallikrein binding protein) to a subject at risk of developing inflammatory pain (e.g., a subject that has experienced an insult, e.g., such as a penetration wound, a burn, extreme cold, a fracture, arthritis, an autoimmune condition, excessive stretching, or infection).

[0751] Scales useful for the assessment of inflammatory pain include, e.g., Wong-Baker FACES Pain Rating Scale (Wong-Baker FACES Pain Rating Scale Foundation), Visual analog scale (VAS) (Huskisson, J. Rheumatol. 9 (5): 768-9 (1982)), McGill Pain Questionnaire (MPQ) (Melzack, Pain 1 (3): 277-99 (1975)), Descriptor differential scale (DDS) (Gracety and Kwilosz, Pain 35 (3): 279-88 (1988)), Faces Pain Scale-Revised (FPS-R) (Hicks et al., Pain 93 (2): 173-83 (2001)), Numerical 11 point box (BS-11) (Jensen et al., Clin J Pain 5 (2): 153-9 (1989)), Numeric Rating Scale (NRS-11) (Hartrick et al., Pain Pract 3 (4): 310-6 (2003)), Dolorimeter Pain Index (DPI) (Hardy et al., (1952). Pain Sensations and Reactions. Baltimore: The Williams & Wilkins Co.), and Brief Pain Inventory (BPI) (Cleeland and Ryan Ann. Acad. Med. Singap. 23 (2): 129-38 (1994)).

[0752] Guidance for the determination of the dosage that delivers a therapeutically effective amount of a plasma kallikrein binding protein may be obtained from animal models of inflammatory pain such as an animal model of chronic inflammatory pain (Wilson et al., Eur J Pain. 10(6):537-49 (2006)) and an inflammatory model of pain and hyperalgesia (Ren and Dubner, ILAR J. 40(3):111-118 (1999)).

### Spinal Stenosis

[0753] Spinal stenosis is a medical condition in which the spinal canal narrows and compresses the spinal cord and nerves. This is usually due to the common occurrence of spinal degeneration that occurs with aging. It can also sometimes be caused by spinal disc herniation, osteoporosis or a tumor. Spinal stenosis may affect the cervical, thoracic or lumbar spine. In some cases, it may be present in all three places in the same patient.

[0754] Symptoms of spinal stenosis include, e.g., pain or cramping in the legs, radiating back and hip pain, pain in the neck and shoulders, loss of balance, and loss of bowel or bladder function (cauda equina syndrome).

[0755] Treatments for spinal stenosis include, e.g., nonsurgical treatments (e.g., physical therapy, non-steroidal anti-inflammatory drugs (NSAIDs) (e.g., aspirin, ibuprofen and indomethacin), analgesics (e.g., acetaminophen), chondroitin sulfate, glucosamine, rest or restricted activity, back brace or corset, epidural steroid injections (e.g., corticosteroid)), and surgery (e.g., decompressive laminectomy, laminotomy and fusion).

[0756] The disclosure provides methods of treating (e.g., ameliorating, reducing, or eliminating one or more symptoms of) spinal stenosis by administering a plasma kallikrein binding protein (e.g., a therapeutically effective amount of a plasma kallikrein binding protein) to a subject having or suspected of having spinal stenosis. Additionally provided are methods of treating spinal stenosis by administering a plasma kallikrein binding protein (e.g., a therapeutically effective amount of a plasma kallikrein binding protein) in combination with a second therapy, e.g., a nonsurgical treatment (e.g., physical therapy and/or a nonsteroidal anti-inflammatory drug (NSAID) (e.g., aspirin, ibuprofen or indomethacin), an analgesic (e.g., acetaminophen), chondroitin sulfate, glucosamine, rest or restricted activity, a back brace or corset, an epidural steroid injection (e.g., corticosteroid), and/or surgery (e.g., decompressive laminectomy, laminotomy and/or fusion). The disclosure also provides methods of preventing spinal stenosis or a symptom thereof by administering a plasma kallikrein binding protein (e.g., a prophylactically effective amount of a plasma kallikrein binding protein) to a subject at risk of developing spinal stenosis (e.g., a subject that has spinal degeneration).

[0757] Guidance for the determination of the dosage that delivers a therapeutically effective amount of a plasma kallikrein binding protein may be obtained from animal models of spinal stenosis, such as a model of lumbar spinal stenosis (Sekiguchi et al., Spine 29, 1105-1111 (2004)).

### Arterial and Venous Thrombosis

[0758] Arterial thrombosis is the formation of a thrombus within an artery. In most cases, arterial thrombosis follows rupture of atheroma, and is therefore referred to as atherothrombosis.

[0759] Arterial thrombosis is associated with a number of disorders, including stroke and myocardial infarction. In thrombotic stroke, a thrombus (blood clot) usually forms around atherosclerotic plaques. Since blockage of the artery is gradual, onset of symptomatic thrombotic strokes is slower. Thrombotic stroke can be divided into two categories—large vessel disease and small vessel disease. The former affects vessels such as the internal carotids, vertebral and the circle of Willis. The latter can affect smaller vessels such as the branches of the circle of Willis. Myocardial infarction (MI) is caused by an infarct (death of tissue due to ischemia), often due to the obstruction of the coronary artery by a thrombus. MI can quickly become fatal if emergency medical treatment is not received promptly.

[0760] Venous thrombosis is a blood clot that forms within a vein. If a piece of a blood clot formed in a vein breaks off, it can be transported to the right side of the heart, and from there into the lungs. A piece of thrombus that is transported in this way is an embolism and the process of forming a thrombus that becomes embolic is called a thromboembolism. An embolism that lodges in the lungs is a pulmonary embolism (PE). A pulmonary embolus is a very serious condition that can be fatal if not recognized and treated promptly.

[0761] Superficial venous thromboses can cause discomfort but generally do not cause serious consequences, unlike the deep venous thromboses (DVTs) that form in the deep veins of the legs or in the pelvic veins. Systemic embolisms of venous origin can occur in patients with an atrial or ventricular septal defect, through which an embolus may pass into the arterial system. Such an event is termed a paradoxical embolism.

[0762] Prevention of arterial and/or venous thrombosis includes medications (e.g., anticoagulants (e.g., heparin), aspirin, and vitamin E) and mechanical methods (e.g., mechanical leg pumps (pneumatic compression stockings)).

[0763] The disclosure provides methods of treating (e.g., ameliorating, reducing, or eliminating one or more symptoms of) arterial and/or venous thrombosis by administering a plasma kallikrein binding protein (e.g., a therapeutically effective amount of a plasma kallikrein binding protein) to a subject having or suspected of having arterial and/or venous thrombosis. Additionally provided are methods of treating arterial and/or venous thrombosis by administering a plasma kallikrein binding protein (e.g., a therapeutically effective amount of a plasma kallikrein binding protein) in combination with a second therapy, e.g., an anticoagulant (e.g., heparin), aspirin, and/or vitamin E and/or a mechanical method (e.g., a mechanical leg pump (pneumatic compression stockings). The disclosure also provides methods of preventing arterial and/or venous thrombosis or a symptom thereof by administering a plasma kallikrein binding protein (e.g., a prophylactically effective amount of a plasma kallikrein binding protein) to a subject at risk of developing arterial and/or venous thrombosis (e.g., a subject that has experienced a stroke or myocardial infarction).

[0764] Guidance for the determination of the dosage that delivers a therapeutically effective amount of a plasma kallikrein binding protein may be obtained from animal models of arterial or venous thrombosis, such as a double-tuck model of arterial thrombosis (Gomez-Jorge et al., J. Vasc. Inter. Rad. 9(4): 633-638 (1998), a model of venous thrombosis in rat with low flow conditions in the venous blood stream (Fredrich et al., Blood Coagul Fibrinolysis. 5(2):243-8 (1994)), and a canine model for venous thrombosis and spontaneous pulmonary embolism (Frisbiel, Spinal Cord 43, 635-639 (2005)).

### Postoperative Ileus

[0765] Postoperative ileus is a temporary paralysis of a portion of the intestines typically after an abdominal surgery. Postoperative ileus commonly occurs for 24 to 72 hours after abdominal surgery.

[0766] Symptoms of postoperative ileus include, e.g., moderate and diffuse abdominal discomfort, constipation, abdominal distension, nausea or vomiting, lack of bowel movement and/or flatulence, and excessive belching.

[0767] Treatments for postoperative ileus include, e.g., nil per os (NPO or “Nothing by Mouth”) until peristaltic sound is heard from auscultation of the area where this portion lies, nasogastric suction, parenteral feeds, and medications (e.g., lactulose and erythromycin).

[0768] The disclosure provides methods of treating (e.g., ameliorating, reducing, or eliminating one or more symptoms of) postoperative ileus by administering a plasma kallikrein binding protein (e.g., a therapeutically effective amount of a plasma kallikrein binding protein) to a subject having or suspected of having postoperative ileus. Additionally provided are methods of treating postoperative ileus by administering a plasma kallikrein binding protein (e.g., a therapeutically effective amount of a plasma kallikrein binding protein) in combination with a second therapy, e.g., nil per os, nasogastric suction, parenteral feeds, and/or a medication (e.g., lactulose and/or erythromycin). The disclosure also provides methods of preventing postoperative ileus or a symptom thereof by administering a plasma kallikrein binding protein (e.g., a prophylactically effective amount of a plasma kallikrein binding protein) to a subject at risk of developing postoperative ileus (e.g., a subject that has had abdominal surgery).

[0769] Guidance for the determination of the dosage that delivers a therapeutically effective amount of a plasma kallikrein binding protein may be obtained from animal models of postoperative ileus, such as a model to investigate postoperative ileus with strain gauge transducers in awake rats (Huge et al. J Surg Res. 74(2):112-8 (1998)).

### Aortic Aneurysm

[0770] An aortic aneurysm is a general term for any swelling (dilatation or aneurysm) of the aorta, usually representing an underlying weakness in the wall of the aorta at that location. Types of aortic aneurysms include aortic root aneurysm, thoracic aortic aneurysm, abdominal aortic aneurysm, and thoracoabdominal aortic aneurysm.

[0771] Most intact aortic aneurysms do not produce symptoms. As they enlarge, symptoms of aortic aneurysm include, e.g., anxiety or feeling of stress, nausea or vomiting, clammy skin, rapid heart rate, abdominal pain, back pain may develop, leg pain or numbness, erythema nodosum (leg lesions typically found near the ankle region), and a hoarse voice as the left recurrent laryngeal nerve winding around the arch of the aorta is stretched. Once an aneurysm is ruptured, it can cause severe pain and massive internal hemorrhage, and is fatal in the absence of prompt treatment.

[0772] Treatments for aortic aneurysm include, e.g., medications, surgical treatment and endovascular treatment. Smaller aneurysms that are not at high risk for rupturing can be treated with drugs to treat high blood pressure, such as beta-blockers; or doxycycline for matrix metalloproteinase-9 inhibition. Surgical treatment typically involves opening up of the dilated portion of the aorta and insertion of a synthetic (Dacron or Gore-tex) patch tube. Endovascular treatment, as a minimally invasive alternative to open surgery repair, involves the placement of an endovascular stent via a percutaneous technique (usually through the femoral arteries) into the diseased portion of the aorta.

[0773] The disclosure provides methods of treating (e.g., stabilizing, reducing, or eliminating one or more symptoms of) aortic aneurysm by administering a plasma kallikrein binding protein (e.g., a therapeutically effective amount of a plasma kallikrein binding protein) to a subject having or suspected of having aortic aneurysm. Additionally provided are methods of treating aortic aneurysm by administering a plasma kallikrein binding protein (e.g., a therapeutically effective amount of a plasma kallikrein binding protein) in combination with a second therapy, e.g., a medication (e.g., a drug to treat high blood pressure (e.g., a beta-blocker) or doxycycline), surgery, and/or an endovascular treatment. The disclosure also provides methods of preventing aortic aneurysm or a symptom thereof by administering a plasma kallikrein binding protein (e.g., a prophylactically effective amount of a plasma kallikrein binding protein) to a subject at risk of developing aortic aneurysm (e.g., a subject that has high blood pressure).

[0774] Guidance for the determination of the dosage that delivers a therapeutically effective amount of a plasma kallikrein binding protein may be obtained from an animal model of aortic aneurysm, e.g., a rat model of abdominal aortic aneurysm using a combination of intraluminal elastase infusion and extraluminal calcium chloride exposure (Tanaka et al. J Vasc Surg. 50(6):1423-32 (2009)).

### Osteoarthritis

[0775] Osteoarthritis, also known as degenerative arthritis, is characterized by the breakdown and eventual loss of the cartilage of one or more joints. Osteoarthritis occurs when the cartilage that cushions the ends of bones in the joints deteriorates over time. The smooth surface of the cartilage becomes rough, causing irritation. If the cartilage wears down completely, the ends of the bones will be damaged. Osteoarthritis commonly affects the hands, feet, spine, and large weight-bearing joints, such as the hips and knees.

[0776] Symptoms of osteoarthritis include, e.g., pain, tenderness, stiffness, loss of flexibility, grating sensation, and bone spurs.

[0777] Treatments for osteoarthritis include, e.g., conservative measures (e.g., rest, weight reduction, physical and occupational therapy) and medications (e.g., acetaminophen, pain-relieving creams applied to the skin over the joints (e.g., capsaicin, salycin, methyl salicylate, and menthol), non-steroidal anti-inflammatory drugs (NSAIDs) (e.g., aspirin, ibuprofen, nabumetone and naproxen), and Cox-2 inhibitors.

[0778] The disclosure provides methods of treating (e.g., stabilizing, reducing, or eliminating one or more symptoms or stabilizing the subject's score on an osteoarthritis scale) osteoarthritis by administering a plasma kallikrein binding protein (e.g., a therapeutically effective amount of a plasma kallikrein binding protein) to a subject having or suspected of having osteoarthritis. Additionally provided are methods of treating osteoarthritis by administering a plasma kallikrein binding protein (e.g., a therapeutically effective amount of a plasma kallikrein binding protein) in combination with a second therapy, e.g., a conservative measure (e.g., rest, weight reduction, physical and/or occupational therapy) and/or a medication (e.g., acetaminophen, a topical pain-relieving cream, an NSAID (e.g., aspirin, ibuprofen, nabumetone, or naproxen), and/or a Cox-2 inhibitor. The disclosure also provides methods of preventing osteoarthritis or a symptom thereof by administering a plasma kallikrein binding protein (e.g., a prophylactically effective amount of a plasma kallikrein binding protein) to a subject at risk of developing osteoarthritis (e.g., a subject that has had a joint injury).

[0779] Scales useful for the assessment of osteoarthritis include, e.g., the Knee Injury and Osteoarthritis Outcome Score (KOOS; Roos et al. (1998) J. Orthop. Sports Phys. Ther. 28(2):88-96), Western Ontario and McMaster Universities Osteoarthrtis Index (WOMAC; Roos et al. (2003) Health Qual. Life Outcomes 1(1):17), and the 36-item Short Form General Health Scale (SF-36 GHS), as well as other assessment tools known in the art.

[0780] Guidance for the determination of the dosage that delivers a therapeutically effective amount of a plasma kallikrein binding protein may be obtained from an animal model of osteoarthritis, e.g., injection of mono-iodoacetate (MIA) into the femorotibial joint of rodents which promotes loss of articular cartilage similar to that noted in human osteoarthritis (Guzman et al. Toxicol Pathol. 31(6):619-24 (2003)), and transection of the anterior cruciate ligament (ACL) in canines to induce osteoarthritis (Fife and Brandt J Clin Invest. 84(5): 1432-1439 (1989)).

### Vasculitis

[0781] Vasculitis refers to a heterogeneous group of disorders that are characterized by inflammatory destruction of blood vessels. Both arteries and veins can be affected. Lymphangitis is sometimes considered a type of vasculitis. Vasculitis is primarily due to leukocyte migration and resultant damage. Vasculitis can be classified by the underlying cause, the location of the affected vessels, or the type or size of the blood vessels. Vasculitis is associated with a number of additional disorders and conditions, e.g., Kawasaki disease, Behcet's disease, Polyarteritis nodosa, Wegener's granulomatosis, Cryoglobulinemia, Takayasu's arteritis, Churg-Strauss syndrome, Giant cell arteritis (temporal arteritis), Henoch-Schönlein purpura, Rheumatic diseases (e.g., rheumatoid arthritis and systemic lupus erythematosus), cancer (e.g., lymphomas), infections (e.g., hepatitis C), exposure to chemicals and drugs (e.g., amphetamines, cocaine, and anthrax vaccines which contain the Anthrax Protective Antigen as the primary ingredient).

[0782] Symptoms of vasculitis include, e.g., fever, weight loss, palpable purpura, livedo reticularis, myalgia or myositis, arthralgia or arthritis, mononeuritis multiplex, headache, stroke, tinnitus, reduced visual acuity, acute visual loss, myocardial infarction, hypertension, gangrene, nose bleeds, bloody cough, lung infiltrates, abdominal pain, bloody stool, perforations, and glomerulonephritis.

[0783] Treatments for vasculitis include, e.g., cortisone-related medications (e.g., prednisone) and immune suppression drugs (e.g., cyclophosphamide).

[0784] The disclosure provides methods of treating (e.g., stabilizing, reducing, or eliminating one or more symptoms or stabilizing the subject's score on a vasculitis scale) vasculitis by administering a plasma kallikrein binding protein (e.g., a therapeutically effective amount of a plasma kallikrein binding protein) to a subject having or suspected of having vasculitis. Additionally provided are methods of treating vasculitis by administering a plasma kallikrein binding protein (e.g., a therapeutically effective amount of a plasma kallikrein binding protein) in combination with a second therapy (e.g., a cortisone-related medication (e.g., prednisone) and/or an immune suppression drug (e.g., cyclophosphamide)). The disclosure also provides methods of preventing vasculitis or a symptom thereof by administering a plasma kallikrein binding protein (e.g., a prophylactically effective amount of a plasma kallikrein binding protein) to a subject at risk of developing vasculitis (e.g., a subject that has had Kawasaki disease, Behcet's disease, Polyarteritis nodosa, Wegener's granulomatosis, Cryoglobulinemia, or Takayasu's arteritis, and so forth).

[0785] The disclosure also provides methods of treating (e.g., stabilizing, reducing, or eliminating one or more symptoms or stabilizing the subject's score on a vasculitis scale) vasculitis associated with systemic lupus erythematosis by administering a plasma kallikrein binding protein (e.g., a therapeutically effective amount of a plasma kallikrein binding protein) to a subject having or suspected of having vasculitis associated with systemic lupus erythematosis. Additionally provided are methods of treating vasculitis associated with systemic lupus erythematosis by administering a plasma kallikrein binding protein (e.g., a therapeutically effective amount of a plasma kallikrein binding protein) in combination with a second therapy, e.g., a cortisone-related medication (e.g., prednisone) and/or an immune suppression drug (e.g., cyclophosphamide).

[0786] Further provided are methods of treating (e.g., ameliorating, stabilizing, or eliminating one or more symptoms) a vasculitis associated disorder (Kawasaki disease, Behcet's disease, Polyarteritis nodosa, Wegener's granulomatosis, Cryoglobulinemia, Takayasu's arteritis, Churg-Strauss syndrome, Giant cell arteritis (temporal arteritis), Henoch-Schönlein purpura, Rheumatic diseases (e.g., rheumatoid arthritis and systemic lupus erythematosus), cancer (e.g., lymphomas), infections (e.g., hepatitis C), exposure to chemicals and drugs (e.g., amphetamines, cocaine, and anthrax vaccines which contain the Anthrax Protective Antigen as the primary ingredient)) by administering a plasma kallikrein binding protein (e.g., a therapeutically effective amount of a plasma kallikrein binding protein) to a subject having or suspected of having a vasculitis associated disorder. The disclosure also provides methods of preventing a vasculitis associated disorder or a symptom thereof by administering a plasma kallikrein binding protein (e.g., a prophylactically effective amount of a plasma kallikrein binding protein) to a subject at risk of developing a vasculitis associated disorder.

[0787] Scales useful for the assessment of osteoarthritis include, e.g., Birmingham Vasculitis Activity score (BVAS) version 3 (Mukhtyar et al. Ann Rheum Dis. 68(12):1827-32 (2009)), as well as other assessment tools known in the art.

[0788] Guidance for the determination of the dosage that delivers a therapeutically effective amount of a plasma kallikrein binding protein may be obtained from an animal model of vasculitis, see e.g., those described in Katz et al., Clin Rev Allergy Immunol. 35(1-2):11-8 (2008) and references cited therein.

### Head Trauma

[0789] Head trauma refers to trauma to the head, which may or may not include injury to the brain. Types of head trauma include concussion, epidural hematoma, subdural hematoma, cerebral contusion, and diffuse axonal injury.

[0790] Symptoms of head trauma include, e.g., coma, confusion, drowsiness, personality change, seizures, nausea and vomiting, headache and a lucid interval, during which a patient appears conscious only to deteriorate later, leaking cerebrospinal fluid, visible deformity or depression in the head or face, an eye that cannot move or is deviated to one side can indicate that a broken facial bone is pinching a nerve that innervates eye muscles, wounds or bruises on the scalp or face, basilar skull fractures, a subcutaneous bleed over the mastoid, hemotympanum, cerebrospinal fluid rhinorrhea, and otorrhea.

[0791] Treatments for head trauma include, e.g., controlling elevated intracranial pressure (e.g., sedation, paralytics, cerebrospinal fluid diversion), decompressive craniectomy, barbiturate coma, hypertonic saline, and hypothermia.

[0792] The disclosure provides methods of treating (e.g., stabilizing, reducing, or eliminating one or more symptoms or stabilizing the subject's score on a head trauma scale) head trauma by administering a plasma kallikrein binding protein (e.g., a therapeutically effective amount of a plasma kallikrein binding protein) to a subject having or suspected of having head trauma. Additionally provided are methods of treating head trauma by administering a plasma kallikrein binding protein (e.g., a therapeutically effective amount of a plasma kallikrein binding protein) in combination with a second therapy, e.g., controlling elevated intracranial pressure (e.g., sedation, a paralytic, and/or cerebrospinal fluid diversion), decompressive craniectomy, barbiturate coma, hypertonic saline, and/or hypothermia. The disclosure also provides methods of preventing head trauma or a symptom thereof by administering a plasma kallikrein binding protein (e.g., a prophylactically effective amount of a plasma kallikrein binding protein) to a subject at risk of developing head trauma (e.g., a subject that will be participating in a dangerous activity or contact sport).

[0793] Scales useful for assessing head trauma and symptoms of head trauma include, e.g., the Glasgow Coma Scale (Teasdale and Jennett, Lancet 13; 2(7872):81-4 (1974)), as well as other assessment tools known in the art.

[0794] Guidance for the determination of the dosage that delivers a therapeutically effective amount of a plasma kallikrein binding protein may be obtained from animal models of head trauma, see, e.g., those described in Cernak, NeuroRx. 2(3): 410-422 (2005) and references cited therein.

### Brain Edema

[0795] Brain edema (cerebral edema) is an excess accumulation of water in the intracellular and/or extracellular spaces of the brain. Types of brain edema include, e.g., vasogenic cerebral edema, cytotoxic cerebral edema, osmotic cerebral edema, and interstitial cerebral edema.

[0796] Vasogenic cerebral edema is due to a breakdown of tight endothelial junctions which make up the blood-brain barrier (BBB). This allows normally excluded intravascular proteins and fluid to penetrate into cerebral parenchymal extracellular space. Once plasma constituents cross the BBB, the edema spreads; this may be quite fast and widespread. As water enters white matter it moves extracellularly along fiber tracts and can also affect the gray matter. This type of edema is seen in response to trauma, tumors, focal inflammation, late stages of cerebral ischemia and hypertensive encephalopathy. Some of the mechanisms contributing to BBB dysfunction are: physical disruption by arterial hypertension or trauma, tumor-facilitated release of vasoactive and endothelial destructive compounds (e.g., arachidonic acid, excitatory neurotransmitters, eicosanoids, bradykinin, histamine and free radicals). Some of the special subcategories of vasogenic edema include: hydrostatic cerebral edema, cerebral edema from brain cancer, high altitude cerebral edema.

[0797] Cytotoxic cerebral edema is due to the derangement in cellular metabolism resulting in inadequate functioning of the sodium and potassium pump in the glial cell membrane. As a result there is cellular retention of sodium and water. Cytoxotic edema is seen with various intoxications (dinitrophenol, triethyltin, hexachlorophene, isoniazid), in Reye's syndrome, severe hypothermia, early ischemia, encephalopathy, early stroke or hypoxia, cardiac arrest, pseudotumor cerebri, and cerebral toxins.

[0798] Osmotic cerebral edema occurs when plasma is diluted by excessive water intake (or hyponatremia), syndrome of inappropriate antidiuretic hormone secretion (SIADH), hemodialysis, or rapid reduction of blood glucose in hyperosmolar hyperglycemic state (HHS), formerly hyperosmolar non-ketotic acidosis (HONK) and brain osmolality exceeds the serum osmolality creating an abnormal pressure.

[0799] Interstitial cerebral edema occurs in obstructive hydrocephalus. This form of edema is due to rupture of cerebral-spinal fluid (CSF)-brain barrier resulting in trans-ependymal flow of CSF, which permits CSF to penetrate brain and spread in the extracellular space of white matter.

[0800] Symptoms of brain edema (e.g., peritumoral brain edema) include, e.g., headache, loss of coordination (ataxia), weakness, and decreasing levels of consciousness including disorientation, loss of memory, hallucinations, psychotic behavior, and coma.

[0801] Treatments for brain edema (e.g., peritumoral brain edema) include, e.g., medications (e.g. dexamethasone, mannitol, diuretics) and surgical decompression.

[0802] The disclosure provides methods of treating (e.g., stabilizing, reducing, or eliminating one or more symptoms of) brain edema (e.g., peritumoral brain edema) by administering a plasma kallikrein binding protein (e.g., a therapeutically effective amount of a plasma kallikrein binding protein) to a subject having or suspected of having brain edema (e.g., peritumoral brain edema). Additionally provided are methods of treating brain edema (e.g., peritumoral brain edema) by administering a plasma kallikrein binding protein (e.g., a therapeutically effective amount of a plasma kallikrein binding protein) in combination with a second therapy, e.g., a medication (e.g. dexamethasone, mannitol, and/or diuretics) and/or surgical decompression. The disclosure also provides methods of preventing brain edema or a symptom thereof by administering a plasma kallikrein binding protein (e.g., a prophylactically effective amount of a plasma kallikrein binding protein) to a subject at risk of developing brain edema (e.g., a subject that has been diagnosed with a brain tumor).

[0803] Guidance for the determination of the dosage that delivers a therapeutically effective amount of a plasma kallikrein binding protein may be obtained from animal models of brain edema, e.g., a rat model of cerebral embolism in which recirculation can be introduced in the ischemic area (Koizumi et al., Jpn J Stroke 8: 1-8 (1986)).

### Sepsis

[0804] Sepsis is a serious medical condition that is characterized by a whole-body inflammatory state and the presence of a known or suspected infection. This immunological response may be caused by microbes in the blood, urine, lungs, skin, or other tissues and can lead to widespread activation of acute-phase proteins, affecting the complement system and the coagulation pathways, which then cause damage to the vasculature as well as to the organs. Different levels of sepsis include systemic inflammatory response syndrome (SIRS), sepsis (SIRS in response to a confirmed infectious process), severe sepsis (sepsis with organ dysfunction, hypoperfusion, or hypotension), and septic shock (sepsis with refractory arterial hypotension or hypoperfusion abnormalities in spite of adequate fluid resuscitation).

[0805] Symptoms of sepsis include, e.g., general symptoms related to the infection, acute inflammation present throughout the entire body, hypothermia or fever, tachycardia, tachypnea or hypocapnia due to hyperventilation, leukopenia, leukocytosis, bandemia, and organ (e.g., lung, brain, liver, kidney, and/or heart) dysfunction.

[0806] Treatments for sepsis include, e.g., antibiotics, vasopressor drugs, insulin, corticosteroids, drotrecogin alfa, surgical drainage of infected fluid collections, fluid replacement, and appropriate support for organ dysfunction (e.g., hemodialysis in kidney failure, mechanical ventilation in pulmonary dysfunction, transfusion of blood products, and drug and fluid therapy for circulatory failure). Early Goal Directed Therapy (EGDT), a systematic approach to resuscitation, can be used to treat severe sepsis and septic shock.

[0807] The disclosure provides methods of treating (e.g., stabilizing, reducing, or eliminating one or more symptoms or stabilizing the subject's score on a sepsis scale) sepsis by administering a plasma kallikrein binding protein (e.g., a therapeutically effective amount of a plasma kallikrein binding protein) to a subject having or suspected of having sepsis. Additionally provided are methods of treating sepsis by administering a plasma kallikrein binding protein (e.g., a therapeutically effective amount of a plasma kallikrein binding protein) in combination with a second therapy, e.g., an antibiotic, a vasopressor drug, insulin, a corticosteroid, drotrecogin alfa, surgical drainage of infected fluid collections, fluid replacement, an appropriate support for organ dysfunction (e.g., hemodialysis in kidney failure, mechanical ventilation in pulmonary dysfunction, transfusion of blood products, and/or drug and fluid therapy for circulatory failure), and/or an Early Goal Directed Therapy (EGDT). The disclosure also provides methods of preventing sepsis or a symptom thereof by administering a plasma kallikrein binding protein (e.g., a prophylactically effective amount of a plasma kallikrein binding protein) to a subject at risk of developing sepsis (e.g., a subject that has been diagnosed as having an infection).

[0808] Scales useful for assessing sepsis and symptoms of sepsis include, e.g., the Baltimore Sepsis Scale (Meek et al. J Burn Care Rehabil. 12(6):564-8 (1991)) as well as other assessment tools known in the art.

[0809] Guidance for the determination of the dosage that delivers a therapeutically effective amount of a plasma kallikrein binding protein may be obtained from animal models of sepsis, see, e.g., those described in U.S. Pat. No. 6,964,856, and Buras et al. Nat Rev Drug Discov. 4(10):854-65 (2005) and references cited therein.

### Acute Middle Cerebral Artery (MCA) Ischemic Event (Stroke)

[0810] An acute middle cerebral artery (MCA) ischemic event (stroke) is the rapidly developing loss of brain function(s) due to disturbance in the blood supply to the brain due to ischemia (lack of glucose and oxygen supply) caused by thrombosis (e.g., venous thrombosis), embolism, or systemic hypoperfusion. As a result, the affected area of the brain is unable to function, leading to inability to move one or more limbs on one side of the body, inability to understand or formulate speech, or inability to see one side of the visual field. A stroke is a medical emergency and can cause permanent neurological damage, complications, and/or death.

[0811] Symptoms of acute middle cerebral artery (MCA) ischemic event (stroke) include, e.g., hemiplegia, decreased sensation and muscle weakness of the face, numbness, reduction in sensory or vibratory sensation, altered smell, taste, hearing or vision (total or partial), drooping of eyelid (ptosis) and weakness of ocular muscles, decreased reflexes, balance problems and nystagmus, altered breathing and heart rate, weakness in sternocleidomastoid muscle with inability to turn head to one side, weakness in tongue (inability to protrude and/or move from side to side), aphasia, apraxia, visual field defect, memory deficits, hemineglect, disorganized thinking, confusion, hypersexual gestures, anosognosia, trouble walking, altered movement coordination, and vertigo and/or disequilibrium.

[0812] Treatment for acute middle cerebral artery (MCA) ischemic event (stroke) includes, e.g., thrombolysis (e.g., tissue plasminogen activator (tPA)), thrombectomy, angioplasty and stenting, therapeutic hypothermia, and medications (e.g., aspirin, clopidogrel and dipyridamole).

[0813] The disclosure provides methods of treating (e.g., stabilizing, reducing, or eliminating one or more symptoms or stabilizing the subject's score on a stroke scale) acute middle cerebral artery (MCA) ischemic event (stroke) by administering a plasma kallikrein binding protein (e.g., a therapeutically effective amount of a plasma kallikrein binding protein) to a subject having or suspected of having acute middle cerebral artery (MCA) ischemic event (stroke). Additionally provided are methods of treating acute middle cerebral artery (MCA) ischemic event (stroke) by administering a plasma kallikrein binding protein (e.g., a therapeutically effective amount of a plasma kallikrein binding protein) in combination with a second therapy, e.g., thrombolysis (e.g., tissue plasminogen activator (tPA)), thrombectomy, angioplasty and stenting, therapeutic hypothermia, and/or a medication (e.g., aspirin, clopidogrel and dipyridamole). The disclosure also provides methods of preventing acute middle cerebral artery (MCA) ischemic event (stroke) or a symptom thereof by administering a plasma kallikrein binding protein (e.g., a prophylactically effective amount of a plasma kallikrein binding protein) to a subject at risk of developing acute middle cerebral artery (MCA) ischemic event (stroke) (e.g., a subject that has experienced systemic hypoperfusion).

[0814] Scales useful for assessing acute middle cerebral artery (MCA) ischemic event (stroke) and symptoms of acute middle cerebral artery (MCA) ischemic event (stroke) include, e.g., Oxford Community Stroke Project classification (OCSP, also known as the Bamford or Oxford classification) (Bamford et al., Lancet 337 (8756): 1521-6 (1991)), and TOAST (Trial of Org 10172 in Acute Stroke Treatment) (Adams et al., Stroke 24 (1): 35-41 (1993)).

[0815] Guidance for the determination of the dosage that delivers a therapeutically effective amount of a plasma kallikrein binding protein may be obtained from animal models of acute middle cerebral artery (MCA) ischemic event (stroke), see, e.g., those described in Beech et al., Brain Res 895: 18-24 (2001), Buchan et al., Stroke 23 (2): 273-9 (1992), Carmichael, NeuroRx 2: 396-409 (2005), Chen et al., Stroke 17 (4): 738-43 (1986), Dittmar et al., Stroke 34: 2252-7 (2003), Dittmar et al., J Neurosci Methods 156: 50 (2006), Gerriets et al., J Neurosci Methods 122: 201-11 (2003), Gerriets et al., Stroke 35: 2372-2377 (2004), Graham et al., Comp Med 54: 486-496 (2004), Koizumi et al., Jpn J Stroke 8: 1-8 (2004), Longa et al., Stroke 20 (1): 84-91 (1989), Mayzel-Oreg, Magn Reson Med 51: 1232-8 (2004), Schmid-Elsaesser et al., Stroke 29 (10): 2162-70 (1989), Tamura et al., J Cereb Blood Flow Metab 1: 53-60 (1981), Watson et al., Ann Neurol 17: 497-504 (1985), and Zhang et al., J Cereb Blood Flow Metab 17: 123-35 (1997).

### Restenosis

[0816] Restenosis is the reoccurrence of stenosis, a narrowing of a blood vessel, leading to restricted blood flow. Restenosis usually pertains to an artery or other large blood vessel that has become narrowed, received treatment to clear the blockage such as angioplasty, and subsequently become renarrowed. It can be defined as a reduction in the circumference of the lumen of 50% or more, and had a high incidence rate (25-50%) in patients who had undergone balloon angioplasty, with the majority of patients needing further angioplasty within 6 months.

[0817] Treatments for restenosis include, e.g., additional angioplasty if restenosis occurs without a stent or at either end of a stent, repeated angioplasty and insertion of another stent inside the original if restenosis occurs within a stent, drug-eluted stents, brachytherapy, and intracoronary radiation.

[0818] The disclosure provides methods of treating (e.g., stabilizing, reducing, or eliminating one or more symptoms of) restenosis (e.g., after angioplasty) by administering a plasma kallikrein binding protein (e.g., a therapeutically effective amount of a plasma kallikrein binding protein) to a subject having or suspected of having restenosis (e.g., after angioplasty). Additionally provided are methods of treating restenosis (e.g., after angioplasty) by administering a plasma kallikrein binding protein (e.g., a therapeutically effective amount of a plasma kallikrein binding protein) in combination with a second therapy, e.g., angioplasty if restenosis occurs without a stent or at either end of a stent, repeated angioplasty and insertion of another stent inside the original if restenosis occurs within a stent, a drug-eluted stent, brachytherapy, and/or intracoronary radiation. The disclosure also provides methods of preventing restenosis or a symptom thereof by administering a plasma kallikrein binding protein (e.g., a prophylactically effective amount of a plasma kallikrein binding protein) to a subject at risk of developing restenosis (e.g., a subject that has had stenosis).

[0819] Guidance for the determination of the dosage that delivers a therapeutically effective amount of a plasma kallikrein binding protein may be obtained from animal models of restenosis, see, e.g., those described in U.S. Pat. Nos. 5,304,122 and 6,034,053, and Kantor et al., Cardiovasc Radiat Med. 1(1):48-54 (1999), and references cited therein.

### Systemic Lupus Erythematosus Nephritis

[0820] Systemic lupus erythematosus nephritis is an inflammation of the kidney caused by systemic lupus erythematosus (SLE), a chronic autoimmune connective tissue disease. SLE can be associated with vasculitis which are disorders characterized by inflammatory destruction of blood vessels.

[0821] Symptoms of systemic lupus erythematosus nephritis include, e.g., general symptoms of kidney disease, weight gain, high blood pressure, darker foamy urine, and swelling around the eyes, legs, ankles or fingers.

[0822] Treatments for systemic lupus erythematosus nephritis include, e.g., steroid therapy (e.g., corticosteroids), chemotherapy (e.g., cyclophosphamide, azathioprine, mycophenolate mofetil, or cyclosporine), and immunosuppressant agents (e.g., mycophenolate mofetil and intravenous cyclophosphamide).

[0823] The disclosure provides methods of treating (e.g., stabilizing, reducing, or eliminating one or more symptoms or stabilizing the subject's score on a lupus scale) systemic lupus erythematosus nephritis by administering a plasma kallikrein binding protein (e.g., a therapeutically effective amount of a plasma kallikrein binding protein) to a subject having or suspected of having systemic lupus erythematosus nephritis. Additionally provided are methods of treating systemic lupus erythematosus nephritis by administering a plasma kallikrein binding protein (e.g., a therapeutically effective amount of a plasma kallikrein binding protein) in combination with a second therapy, e.g., steroid therapy (e.g., a corticosteroid), chemotherapy (e.g., cyclophosphamide, azathioprine, mycophenolate mofetil, and/or cyclosporine), and/or an immunosuppressant agent (e.g., mycophenolate mofetil and/or intravenous cyclophosphamide). The disclosure also provides methods of preventing systemic lupus erythematosus nephritis or a symptom thereof by administering a plasma kallikrein binding protein (e.g., a prophylactically effective amount of a plasma kallikrein binding protein) to a subject at risk of developing systemic lupus erythematosus nephritis (e.g., a subject that has been diagnosed with lupus or a subject having a family member with lupus or a genetic predisposition thereto).

[0824] Scales useful for assessing systemic lupus erythematosus nephritis and symptoms of systemic lupus erythematosus nephritis include, e.g., World Health Organization (WHO) classification based on the biopsy (Weening et al., J. Am. Soc. Nephrol. 15 (2): 241-50 (2004)) as well as other assessment tools known in the art.

[0825] Guidance for the determination of the dosage that delivers a therapeutically effective amount of a plasma kallikrein binding protein may be obtained from animal models of systemic lupus erythematosus nephritis, see, e.g., those described in U.S. Pat. No. 7,26,5261, Peng, Methods Mol Med. 102:227-72 (2004), and references cited therein.

### Burn Injury and Wound Healing

[0826] A burn injury is a type of injury that may be caused by heat, electricity, chemicals, light, radiation, or friction. Muscle, bone, blood vessel, dermal and epidermal tissue can all be damaged with subsequent pain due to profound injury to nerves. Depending on the location affected and the degree of severity, a burn victim may experience a wide number of potentially fatal complications including shock, infection, electrolyte imbalance and respiratory distress. In burn injuries, the damage to epidermis and dermal elements is the result of several key insults which can be divided into initial (e.g., heat injury, inflammatory mediator injury, ischemia induced injury) and delayed insults. Excess heat causes rapid protein denaturation and cell damage. Much of the tissue damage, e.g., in the perfused subsurface burn, can be caused by toxic mediators of inflammation (e.g., oxidants and/or proteases) which are activated with the burn. Consumption of wound oxygen by neutrophils can lead to tissue hypoxia. Instant surface vascular thrombosis occurs along with cell death from the heat insult and causes ischemia and further tissue damage. Delayed injury after the initial heat and mediator damage includes, e.g., inflammation caused by neurotic tissue, bacteria on surface, caustic topical agents, and surface exudate; and continued damage to viable cells and new tissue growth by excess wound proteolytic activity and oxidant release.

[0827] Treatments of burn injury include, e.g., intravenous fluids, dressings, pain management (e.g., analgesics (e.g., ibuprofen and acetaminophen), narcotics, and local anesthetics), inflammatory mediator inhibitors, and antibiotics.

[0828] The disclosure provides methods of treating (e.g., stabilizing, reducing, or eliminating one or more symptoms or stabilizing the subject's score on a burn scale) a burn injury and/or promoting wound healing by administering a plasma kallikrein binding protein (e.g., a therapeutically effective amount of a plasma kallikrein binding protein) to a subject having or suspected of having a burn injury. Additionally provided are methods of treating a burn injury by administering a plasma kallikrein binding protein (e.g., a therapeutically effective amount of a plasma kallikrein binding protein) in combination with a second therapy, e.g., intravenous fluid, a dressing, pain management (e.g., an analgesic (e.g., ibuprofen and acetaminophen), a narcotic, and a local anesthetic), an inflammatory mediator inhibitor, and an antibiotic. The disclosure also provides methods of preventing burn injuries or a symptom thereof by administering a plasma kallikrein binding protein (e.g., a prophylactically effective amount of a plasma kallikrein binding protein) to a subject at risk of developing burn injuries (e.g., a subject whose occupation creates a risk of a burn injury, e.g., firefighter or cook).

[0829] Scales useful for assessing burns and symptoms of burns include, e.g., burn scales by degrees, by thickness, and by total body surface area (TBSA) (Meek et al. J Burn Care Rehabil. 12(6):564-8 (1991)) as well as other assessment tools known in the art.

[0830] Guidance for the determination of the dosage that delivers a therapeutically effective amount of a plasma kallikrein binding protein may be obtained from animal models of burn, such as a porcine burn model (Singer and McClain, Methods MolMed. 78:107-19 (2003), a sheep model of thermal injury (Jonkam et al., Shock, 28:704-709 (2007)), a rabbit model of thermal injury (Nwariaku et al., Burns, 22:324-327 (1996)), and a mouse model of burn wounding (Stevenson et al., Methods Mol Med. 78:95-105 (2003)).

### Combination Therapies

[0831] A plasma kallikrein binding protein described herein, e.g., an anti-plasma kallikrein antibody, e.g., an anti-plasma kallikrein Fab or IgG, can be administered in combination with one or more of the other therapies for treating a disease or condition associated with plasma kallikrein activity, e.g., a disease or condition described herein. For example, a plasma kallikrein binding protein can be used therapeutically or prophylactically with surgery, another anti-plasma kallikrein Fab or IgG (e.g., another Fab or IgG described herein), another plasma kallikrein inhibitor, a peptide inhibitor, or small molecule inhibitor. Examples of plasma kallikrein inhibitors that can be used in combination therapy with a plasma kallikrein binding protein described herein include plasma kallikrein inhibitors described in, e.g., WO 95/21601 or WO 2003/103475.

[0832] One or more plasma kallikrein inhibitors can be used in combination with one or more plasma kallikrein binding proteins described herein. For example, the combination can result in a lower dose of the inhibitor being needed, such that side effects are reduced.

[0833] A plasma kallikrein binding protein described herein can be administered in combination with one or more current therapies for treating a plasma kallikrein associated disease or condition, including, but not limited to the current therapies for treating the disorder, e.g., a current therapy for rheumatoid arthritis, gout, intestinal bowel disease, oral mucositis, neuropathic pain, inflammatory pain, spinal stenosis-degenerative spine disease, arterial or venous thrombosis, post operative ileus, aortic aneurysm, osteoarthritis, vasculitis, head trauma or peri-tumor brain edema, sepsis, acute middle cerebral artery (MCA) ischemic event (stroke), restenosis (e.g., after angioplasty), systemic lupus erythematosis nephritis, burn injury, or wound healing. For example, pKal inhibition is a novel mechanism of treating disease and therefore could provide effects that are synergistic or additive with other therapeutics. For example, a protein described herein that inhibits plasma kallikrein or that inhibits a downstream event of plasma kallikrein activity can also be used in combination with another treatment for a plasma kallikrein associated disease, such as surgery or administration of a second agent, e.g., as described herein. For example, the second agent can include ecallantide, a C1 esterase inhibitor (e.g., CINRYZE™), aprotinin (TRASYLOL®), a bradykinin B2 receptor inhibitor (e.g., icatibant (FIRAZYR®)).

[0834] The term “combination” refers to the use of the two or more agents or therapies to treat the same patient, wherein the use or action of the agents or therapies overlap in time. The agents or therapies can be administered at the same time (e.g., as a single formulation that is administered to a patient or as two separate formulations administered concurrently) or sequentially in any order. Sequential administrations are administrations that are given at different times. The time between administration of the one agent and another agent can be minutes, hours, days, or weeks. The use of a plasma kallikrein binding protein described herein can also be used to reduce the dosage of another therapy, e.g., to reduce the side effects associated with another agent that is being administered. Accordingly, a combination can include administering a second agent at a dosage at least 10, 20, 30, or 50% lower than would be used in the absence of the plasma kallikrein binding protein.

[0835] The second agent or therapy can also be another agent for a plasma kallikrein associated therapy. Non-limiting examples of another treatment for a plasma kallikrein associated disease or condition include, e.g., ecallantide, a C1 esterase inhibitor (e.g., CINRYZE™), aprotinin (TRASYLOL®), a bradykinin B2 receptor inhibitor (e.g., icatibant (FIRAZYR®)) or a second binding protein described herein.

[0836] A combination therapy can include administering an agent that reduces the side effects of other therapies. The agent can be an agent that reduces the side effects of a plasma kallikrein associated disease treatment. For example, for inflammatory diseases, a pKal inhibitor could be steroid sparring. Also, there could be synergism with a TNF-alpha inhibitor for treating inflammation or a VEGF blocker for treating cancer and/or angiogenesis.

### Diagnostic Uses

[0837] A protein that binds to plasma kallikrein described herein can have in vitro and in vivo diagnostic utilities. A plasma kallikrein binding protein described herein (e.g., a protein that binds or binds and inhibits plasma kallikrein) can be used, e.g., for in vivo imaging, e.g., during a course of treatment for a disease or condition in which plasma kallikrein is active, e.g., a disease or condition described herein, or in diagnosing a disease or condition described herein.

[0838] In one aspect, the disclosure provides a diagnostic method for detecting the presence of plasma kallikrein, in vitro or in vivo (e.g., in vivo imaging in a subject). The method can include localizing plasma kallikrein within a subject or within a sample from a subject. With respect to sample evaluation, the method can include, for example: (i) contacting a sample with plasma kallikrein binding protein; and (ii) detecting the location of the plasma kallikrein binding protein in the sample.

[0839] A plasma kallikrein binding protein can also be used to determine the qualitative or quantitative level of expression of plasma kallikrein in a sample. The method can also include contacting a reference sample (e.g., a control sample, e.g., a negative control) with the binding protein, and determining a corresponding assessment of the reference sample. A difference (e.g., increase), e.g., a statistically significant difference, in the formation of the complex in the sample or subject relative to the control sample or subject can be indicative of the presence of plasma kallikrein in the sample. In one embodiment, the plasma kallikrein binding protein does not cross react with another kallikrein protein, such as tissue kallikrein and/or with plasma prekallikrein. E.g., the binding protein binds to another kallikrein protein or to prekallikrein 5- to 10-fold less well (or even less well) than it binds to plasma kallikrein. For example, the binding protein can bind to plasma kallikrein with a KD of ˜10-50 pM, whereas it binds to tissue kallikrein and/or prekallikrein at ˜10 nM.

[0840] The plasma kallikrein binding protein can be directly or indirectly labeled with a detectable substance to facilitate detection of the bound or unbound antibody. Suitable detectable substances include various enzymes, prosthetic groups, fluorescent materials, luminescent materials and radioactive materials.

[0841] Complex formation between the plasma kallikrein binding protein and plasma kallikrein can be detected by evaluating the binding protein bound to the plasma kallikrein or unbound binding protein. Conventional detection assays can be used, e.g., an enzyme-linked immunosorbent assays (ELISA), a radioimmunoassay (RIA) or tissue immunohistochemistry. Further to labeling the plasma kallikrein binding protein, the presence of plasma kallikrein can be assayed in a sample by a competition immunoassay utilizing standards labeled with a detectable substance and an unlabeled plasma kallikrein binding protein. In one example of this assay, the biological sample, the labeled standards, and the plasma kallikrein binding protein are combined and the amount of labeled standard bound to the unlabeled binding protein is determined. The amount of plasma kallikrein in the sample is inversely proportional to the amount of labeled standard bound to the plasma kallikrein binding protein.

[0842] Fluorophore and chromophore labeled proteins can be prepared. Because antibodies and other proteins absorb light having wavelengths up to about 310 nm, the fluorescent moieties should be selected to have substantial absorption at wavelengths above 310 nm and preferably above 400 nm. A variety of suitable fluorescers and chromophores are described by Stryer, 1968, Science 162:526 and Brand, L. et al., 1972, Annu. Rev. Biochem. 41:843-868. The proteins can be labeled with fluorescent chromophore groups by conventional procedures such as those disclosed in U.S. Pat. Nos. 3,940,475, 4,289,747, and 4,376,110. One group of fluorescers having a number of the desirable properties described above is the xanthene dyes, which include the fluoresceins and rhodamines. Another group of fluorescent compounds are the naphthylamines. Once labeled with a fluorophore or chromophore, the protein can be used to detect the presence or localization of the plasma kallikrein in a sample, e.g., using fluorescent microscopy (such as confocal or deconvolution microscopy).

[0843] Histological Analysis. Immunohistochemistry can be performed using the proteins described herein. For example, in the case of an antibody, the antibody can be synthesized with a label (such as a purification or epitope tag), or can be detectably labeled, e.g., by conjugating a label or label-binding group. For example, a chelator can be attached to the antibody. The antibody is then contacted to a histological preparation, e.g., a fixed section of tissue that is on a microscope slide. After an incubation for binding, the preparation is washed to remove unbound antibody. The preparation is then analyzed, e.g., using microscopy, to identify if the antibody bound to the preparation.

[0844] Of course, the antibody (or other polypeptide or peptide) can be unlabeled at the time of binding. After binding and washing, the antibody is labeled in order to render it detectable.

[0845] Protein Arrays. The plasma kallikrein binding protein can also be immobilized on a protein array. The protein array can be used as a diagnostic tool, e.g., to screen medical samples (such as isolated cells, blood, sera, biopsies, and the like). Of course, the protein array can also include other binding proteins, e.g., that bind to plasma kallikrein or to other target molecules.

[0846] Methods of producing polypeptide arrays are described, e.g., in De Wildt et al., 2000, Nat. Biotechnol. 18:989-994; Lueking et al., 1999, Anal. Biochem. 270:103-111; Ge, 2000, Nucleic Acids Res. 28, e3, I-VII; MacBeath and Schreiber, 2000, Science 289:1760-1763; WO 01/40803 and WO 99/51773A1. Polypeptides for the array can be spotted at high speed, e.g., using commercially available robotic apparati, e.g., from Genetic MicroSystems or BioRobotics. The array substrate can be, for example, nitrocellulose, plastic, glass, e.g., surface-modified glass. The array can also include a porous matrix, e.g., acrylamide, agarose, or another polymer.

[0847] For example, the array can be an array of antibodies, e.g., as described in De Wildt, supra. Cells that produce the proteins can be grown on a filter in an arrayed format. Polypeptide production is induced, and the expressed polypeptides are immobilized to the filter at the location of the cell. A protein array can be contacted with a labeled target to determine the extent of binding of the target to each immobilized polypeptide. Information about the extent of binding at each address of the array can be stored as a profile, e.g., in a computer database. The protein array can be produced in replicates and used to compare binding profiles, e.g., of a target and a non-target.

[0848] FACS (Fluorescence Activated Cell Sorting). The plasma kallikrein binding protein can be used to label cells, e.g., cells in a sample (e.g., a patient sample). The binding protein is also attached (or attachable) to a fluorescent compound. The cells can then be sorted using fluorescence activated cell sorter (e.g., using a sorter available from Becton Dickinson Immunocytometry Systems, San Jose Calif.; see also U.S. Pat. Nos. 5,627,037; 5,030,002; and 5,137,809). As cells pass through the sorter, a laser beam excites the fluorescent compound while a detector counts cells that pass through and determines whether a fluorescent compound is attached to the cell by detecting fluorescence. The amount of label bound to each cell can be quantified and analyzed to characterize the sample.

[0849] The sorter can also deflect the cell and separate cells bound by the binding protein from those cells not bound by the binding protein. The separated cells can be cultured and/or characterized.

[0850] In vivo Imaging. Also featured is a method for detecting the presence of plasma kallikrein expressing tissues in vivo. The method includes (i) administering to a subject (e.g., a patient having, e.g., a plasma kallikrein associated disease or condition) an anti-plasma kallikrein antibody, conjugated to a detectable marker; (ii) exposing the subject to a means for detecting said detectable marker to the plasma kallikrein expressing tissues or cells. For example, the subject is imaged, e.g., by NMR or other tomographic means.

[0851] Examples of labels useful for diagnostic imaging include radiolabels such as ¹³¹I, ¹¹¹In, ¹²³I, ^{99m}Tc, ³²P, ¹²⁵I, ³H, ¹⁴C, and ¹⁸⁸Rh, fluorescent labels such as fluorescein and rhodamine, nuclear magnetic resonance active labels, positron emitting isotopes detectable by a positron emission tomography (“PET”) scanner, chemiluminescers such as luciferin, and enzymatic markers such as peroxidase or phosphatase. Short range radiation emitters, such as isotopes detectable by short range detector probes can also be employed. The protein can be labeled with such reagents; for example, see Wensel and Meares, 1983, Radioimmunoimaging and Radioimmunotherapy, Elsevier, New York for techniques relating to the radiolabeling of antibodies and D. Colcher et al., 1986, Meth. Enzymol. 121: 802-816.

[0852] The binding protein can be labeled with a radioactive isotope (such as ¹⁴C, ³H, ³⁵S, ¹²⁵I, ³²P, ¹³¹I). A radiolabeled binding protein can be used for diagnostic tests, e.g., an in vitro assay. The specific activity of a isotopically-labeled binding protein depends upon the half life, the isotopic purity of the radioactive label, and how the label is incorporated into the antibody.

[0853] In the case of a radiolabeled binding protein, the binding protein is administered to the patient, is localized to cells bearing the antigen with which the binding protein reacts, and is detected or “imaged” in vivo using known techniques such as radionuclear scanning using e.g., a gamma camera or emission tomography. See e.g., A. R. Bradwell et al., “Developments in Antibody Imaging”, Monoclonal Antibodies for Cancer Detection and Therapy, R. W. Baldwin et al., (eds.), pp 65 85 (Academic Press 1985). Alternatively, a positron emission transaxial tomography scanner, such as designated Pet VI located at Brookhaven National Laboratory, can be used where the radiolabel emits positrons (e.g., ¹¹C, ¹⁸F, ¹⁵O, and ¹³N).

[0854] MRI Contrast Agents. Magnetic Resonance Imaging (MRI) uses NMR to visualize internal features of living subject, and is useful for prognosis, diagnosis, treatment, and surgery. MRI can be used without radioactive tracer compounds for obvious benefit. Some MRI techniques are summarized in EP-A-0 502 814. Generally, the differences related to relaxation time constants T1 and T2 of water protons in different environments are used to generate an image. However, these differences can be insufficient to provide sharp high resolution images.

[0855] The differences in these relaxation time constants can be enhanced by contrast agents. Examples of such contrast agents include a number of magnetic agents paramagnetic agents (which primarily alter T1) and ferromagnetic or superparamagnetic (which primarily alter T2 response). Chelates (e.g., EDTA, DTPA and NTA chelates) can be used to attach (and reduce toxicity) of some paramagnetic substances (e.g., Fe⁺³, Mn⁺², Gd⁺³). Other agents can be in the form of particles, e.g., less than 10 mm to about 10 nM in diameter). Particles can have ferromagnetic, antiferromagnetic, or superparamagnetic properties. Particles can include, e.g., magnetite (Fe₃O₄), γ-Fe₂O₃, ferrites, and other magnetic mineral compounds of transition elements. Magnetic particles may include: one or more magnetic crystals with and without nonmagnetic material. The nonmagnetic material can include synthetic or natural polymers (such as sepharose, dextran, dextrin, starch and the like.

[0856] The plasma kallikrein binding protein can also be labeled with an indicating group containing of the NMR active ¹⁹F atom, or a plurality of such atoms inasmuch as (i) substantially all of naturally abundant fluorine atoms are the ¹⁹F isotope and, thus, substantially all fluorine containing compounds are NMR active; (ii) many chemically active polyfluorinated compounds such as trifluoracetic anhydride are commercially available at relatively low cost; and (iii) many fluorinated compounds have been found medically acceptable for use in humans such as the perfluorinated polyethers utilized to carry oxygen as hemoglobin replacements. After permitting such time for incubation, a whole body MRI is carried out using an apparatus such as one of those described by Pykett, 1982, Sci. Am. 246:78 88 to locate and image tissues expressing plasma kallikrein.

[0857] The following examples provide further illustration and are not limiting.

### EXAMPLES

### Example 1

[0858] We have discovered several antibody inhibitors and binders of plasma kallikrein (pKal). The most potent of these have been further characterized and shown to have apparent inhibition constants (K_{i,app})<10 nM, to be specific pKal inhibitors with respect to other tested serine proteases, and to not bind prekallikrein. Amino acid sequences of the CDRs for the inhibitors and the binders are shown in Tables 1 and 2, respectively.

TABLE 1
CDR Amino Acid Sequences, ELISA Signal, and Apparent Inhibition Constant of Antibody
Inhibitors of PKal

| | Human | Human | | | | | | | |
|---|---|---|---|---|---|---|---|---|---|
| | pKal | pKal | | | | | | | |
| Initial | ELISA | (Ki, app | | | | | HV- | | |
| Name | (T/B) | nM) | | LV-CDR1 | LV-CDR2 | LV-CDR3 | CDR1 | HV-CDR2 | HV-CDR3 |
| M6-D09 | 39.9 | 5.9 | | RASQSIRNYLN | AASTLQS | QQLSGYPHT | FYYMV | VIYPSGGITVYADSVKG | DKWAVMPPYYYYAMDV |
| M7-B04 | 4.1 | 54 | | TGTNSDVGNYNLVS | EVNKRPS | CSYAGNRNFYV | WYSMV | SISPSGGLTNYADSVKG | HTAARPFYYYYMDV |
| M7-E07 | 45.7 | 36 | | SGDKLGDKYAC | QDSKRPS | QAWDSSTGV | WYLMI | YIYPSGGFTYYADSVKG | TEGPLSWGYGMDV |
| M8-A09 | 5.4 | 105 | | SGDKLGNKYAY | QDNNRPS | QAWDSRTVV | TYFML | SIYPSGGNTVYADSVKG | AASPVRNYYYYGMDV |
| M10-F10 | 39.2 | <100 | nM | RASQSISVYLN | GASNLQF | QQTFSLFT | FYNMN | SISPSGGETNYADSVKG | GGGAYRNNWWGGFDI |
| M10-H05 | 42.2 | 18 | | RASQSVSSSYLA | GASSRAT | QQYGSSPFT | PYNMY | SIRPSGGGTVYADSVKG | GFIAARWYYFDY |
| M12-D05 | 48.5 | 5.2 | | SGDQLGDKYVG | QDTKRPS | QAWDTSTAG | WYTMV | RIYPSGGWTKYADSVKG | EGLLWFGENAFDI |
| M27-E05 | 41.3 | 16 | | SGDKLGDKYAC | QDSKRPS | QAWDSSTGV | WYLMI | YIYPSGGFTYYADSVKG | TEGPLSWGYGMDV |
| M28-B11 | 33.3 | 5.5 | | SGDQLGDKYVG | QDTKRPS | QAWDTSTAG | WYTMV | RIYPSGGWTKYADSVKG | EGLLWFGENAFDI |
| M29-D09 | 47.5 | 0.7 | | SGNKLGDKYVA | QDTKRPS | QAWDSSIVI | WYTMV | YIYPSGGATFYADSVKG | GSYDYIWGFYSDH |
| M29-E09 | 28.8 | 11 | | SGDNLGNKYNS | QDTKRPS | QAWDGNVV | WYEMG | SIYSSGGGTMYADSVKG | NPQYSGYDRSLSDGAFDI |
| M35-G04 | 11.1 | 2.9 | | RASQSVSSYLA | DASNRAT | QQRSNWPRGFT | YYHMS | VISPSGGSTKYADSVKG | GGSSDYAWGSYRRPYYFDY |
| M38-F02 | 33.5 | 14 | | SGEKLGDKYVS | EDSRRPS | QAWDSSTAI | YYMMV | YIYSSGGHTVYADSVKG | DLFLYDFWSKGAFDI |
| M41-A11 | 28.0 | 13 | | SGDKLGDKYTS | QDIKRPS | QAWDSPNARV | HYRMS | SIYPSGGRTVYADSVKG | DKFEWRLLFRGIGNDAFDI |
| M73-D06 | 4.0 | <100 | nM | SGSSSNIGSNTVS | NDHRRPS | SAWDDSLNGVV | RYEMY | SISSSGGPTAYADSVKG | GTPKWELLLRSIYIENAFDI |
| M76-D01 | 11.2 | <100 | nM | RSSQSLSDDGN | TLSYRAS | MQGTHWPPT | FYAMH | GIVPSGGRTHYADSVKG | DSSGSPNPLFDY |
| | | | | TYLD | | | | | |
| M110-C12 | 2.4 | <100 | nM | RSSLSLLHSNGY | LSSTRAS | MQPLETPPT | YYEMD | GISSSGGHTAYADSVKG | ERRSSSRARYYYGMDV |
| | | | | NYLD | | | | | |
| M137-E12 | 4.5 | 79 | | SGNNSNFGSNTVT | SDSRRPS | AAWDDSLNGV | DYRMQ | VIVPSGGNTMYADSVKG | GGPGSSIAARRAPTGYYGMDV |
| M142-H08 | 29.9 | 0.2 | | RASQPIDNYLN | AASRLQS | QQSYTVPYT | AYSMI | YIRPSGGRTTYADSVKG | GGLLLWFRELKSNYFDY |
| M145-D01 | 6.2 | 1.1 | | RASQSVSSYLA | DASNRAT | QQRSNWPRGFT | YYHMS | VISPSGGSTKYADSVKG | GGSSDYAWGSYRRPYYFDY |
| M145-D11 | 40.0 | 0.79 | | SGDKLGDKYTS | QDIKRPS | QAWDSPNARV | HYRMS | SIYPSGGRTVYADSVKG | DKFEWRLLFRGIGNDAFDI |
| M146-E12 | 49.6 | 2.2 | | RASGDIGNALG | DASTLQS | LQGYNYPRT | RYIMH | SISPSGGLTSYADSVKG | EFENAYHYYYYGMDV |
| M152-A12 | 19. | <100 | nM | RASQSISSYLS | AASSLQS | QQSISIPRT | PYFMG | GIGPSGGSTTYADSVKG | EGPPYSSGWYRGLRQYHFDY |
| M160-G12 | 38.3 | 17 | | RASQGISSYLA | AASTLQS | QQLNSYPLT | HYLMT | YISPSGGHTIYADSVKG | VARGIAARSRTSYFDY |
| M161-C11 | 41.8 | 0.3 | | SGDKLGDKYVS | QDTKRPS | QAWDSSTYV | DYAMK | SISSSGGVTQYADSVKG | EEDYSSSWYSRRFDYYYGMDV |
| M162-A04 | 11.4 | 4.8 | | RASQSISSWLA | KASTLES | QQYNTYWT | HYIMM | GIYSSGGITVYADSVKG | RRTGIPRRDAFDI |
| X67-B03 | nd | 2.1 | | RASQPIDNYLN | AASRLQS | QQSYTVPYT | AYSMI | YIRPSGGRTTYADSVKG | GGLLLWSRELKSNYFDY |
| X67-C03 | nd | 0.7 | | RASQPIDNYLN | AASRLQS | QQSYTVPYT | AYSMI | YIRPSGGRTTYADSVKG | GGLLLWFMELKSNYFDY |
| X67-C09 | nd | 8.6 | | RASQPIDNYLN | AASRLQS | QQSYTVPYT | AYSMI | YIRPSGGRTTYADSVKG | GGLLLWGRELKSNYFDY |
| X67-D03 | nd | 0.1 | | RASQPIDNYLN | AASRLQS | QQSYTVPYT | AYSMI | YIRPSGGRTTYADSVKG | GGLLLWNRELKSNYFDY |
| X67-E04 | nd | 1.3 | | RASQPIDNYLN | AASRLQS | QQSYTVPYT | AYSMI | YIRPSGGRTTYADSVKG | GGLLLWDRELKSNYFDY |
| X67-F01 | nd | 0.9 | | RASQPIDNYLN | AASRLQS | QQSYTVPYT | AYSMI | YIRPSGGRTTYADSVKG | GGLLLWQRELKSNYFDY |
| X67-F10 | nd | 1.3 | | RASQPIDNYLN | AASRLQS | QQSYTVPYT | AYSMI | YIRPSGGRTTYADSVKG | GGLLLWTRELKSNYFDY |
| X67-G04 | nd | 0.35 | | RASQPIDNYLN | AASRLQS | QQSYTVPYT | AYSMI | YIRPSGGRTTYADSVKG | GGLLLWARELKSNYFDY |
| X67-H04 | nd | 3.6 | | RASQPIDNYLN | AASRLQS | QQSYTVPYT | AYSMI | YIRPSGGRTTYADSVKG | GGLLLWERELKSNYFDY |
| X81-E01 | nd | 0.2 | | RTSQFVNSNYLA | GASSRAT | QQSSRTPWT | HYLMT | YISPSGGHTIYADSVKG | VARGIAARSRTSYFDY |

Abbreviations used:
“T/B” is the ELISA signal obtained using of the “target” (biotinylated plasma kallikrein) divided by the ELISA signal of the “background” (streptavidin); both of which were coated on microtiter plates.
“nd” is not determined.
The symbol “q” refers to the amber suppressible stop codon (TAG), which is translated as glutamine (Q) in strains of E. coli such as the TG1 cells that were used to express the Fab fragments.

[0859] Amino acid sequences of light chain (LC) and heavy chain (HC) variable domain of pKal antibody inhibitors are shown below.

| M6-D09 LC | |
|---|---|
| QDIQMTQSPS SLSASVGDRV TITCRASQSI RNYLNWYQQK PGKAPNLLIY AASTLQSGVP | 60 |
| ARFSGSGSGT DFTLTISSLQ PEDFATYYCQ QLSGYPHTFG QGTKLEIK | 108 |
| M6-D09 HC | |
| EVQLLESGGG LVQPGGSLRL SCAASGFTFS FYYMVWVRQA PGKGLEWVSV IYPSGGITVY | 60 |
| ADSVKGRFTI SRDNSKNTLY LQMNSLRAED TAVYYCARDK WAVMPPYYYY AMDVWGQGTT | 120 |
| VTVSSASTKG PSVFPLAPSS KS | 142 |
| M7-B04 LC | |
| QSALTQPASV SGSPGQSITI SCTGTNSDVG NYNLVSWYQQ HPGEAPKLLI YEVNKRPSGV | 60 |
| SNRFSGSKSG NTASLTISGL QAEDEADYLC CSYAGNRNFY VFGAGTKVTV L | 111 |
| M7-B04 HC | |
| EVQLLESGGG LVQPGGSLRL SCAASGFTFS WYSMVWVRQA PGKGLEWVSS ISPSGGLTNY | 60 |
| ADSVKGRFTI SRDNSKNTLY LQMNSLRAED TAVYYCARHT AARPFYYYYM DVWGKGTTVT | 120 |
| VSSASTKGPS VFPLAPSSKS | 140 |
| M7-E07 LC | |
| QSELTQPPSV SVSPGQTASI TCSGDKLGDK YACWYQQKPG QSPVLVIYQD SKRPSGIPER | 60 |
| FSGSNSGNTA TLTISGTQAM DEADYYCQAW DSSTGVFGGG TKLTVL | 106 |
| M7-E07 HC | |
| EVQLLESGGG LVQPGGSLRL SCAASGFTFS WYLMIWVRQA PGKGLEWVSY IYPSGGFTYY | 60 |
| ADSVKGRFTI SRDNSKNTLY LQMNSLRAED MAVYYCARTE GPLSWGYGMD VWGQGTTVTV | 120 |
| SSASTKGPSV FPLAPSSKS | 139 |
| M8-A09 LC | |
| QCELTQPPSE SVSPGQTANI TCSGDKLGNK YAYWYQQKPG QSPVLVIYQD NNRPSGIPER | 60 |
| FSGSNSGNTA TLTISGTQAI DEANYYCQAW DSRTVVFGGG TKLTVL | 106 |
| M8-A09 HC | |
| EVQLLESGGG LVQPGGSLRL SCAASGFTFS TYFMLWVRQA PGKGLEWVSS IYPSGGNTVY | 60 |
| ADSVKGRFTI SRDNSKNTLY LQMNSLRAED TAVYYCARAA SPVRNYYYYG MDVWGQGTTV | 120 |
| TVSSASTKGP SVFPLAPSSK S | 141 |
| M10-F10 LC | |
| QDIQMTQSPS SLSASVGDRV TITCRASQSI SVYLNWYQHK PGKAPKLLIY GASNLQFGVP | 60 |
| SRFSGSGYGT DFTLTISSLQ PEDFATYHCQ QTFSLFTFGG GTKVEIK | 107 |
| M10-F10 HC | |
| EVQLLESGGG LVQPGGSLRL SCAASGFTFS FYNMNWVRQA PGKGLEWVSS ISPSGGETNY | 60 |
| ADSVKGRFTI SRDNSKNTLY LQMNSLRAED TAVYYCARGG GAYRNNWWGG FDIWGLGTMV | 120 |
| TVSSASTKGP SVFPLAPSSK S | 141 |
| M10-H05 LC | |
| QDIQMTQSPG TLSLSPGERA TLSCRASQSV SSSYLAWYQQ KPGQAPRLLI YGASSRATGI | 60 |
| PDRFSGSGSG TDFTLTISRL EPEDFAVYYC QQYGSSPFTF GPGTKVDIK | 109 |
| M10-H05 HC | |
| EVQLLESGGG LVQPGGSLRL SCAASGFTFS PYNMYWVRQA PGKGLEWVSS IRPSGGGTVY | 60 |
| ADSVKGRFTI SRDNSKNTLY LQMNSLRAED TAVYYCAGGF IAARWYYFDY WGQGTLVTVS | 120 |
| SASTKGPSVF PLAPSSKS | 138 |
| M12-D05 LC | |
| QSVLTQPPSV SVSPGQTATI TCSGDQLGDK YVGWYQQKPG QSPILVIYQD TKRPSGIPER | 60 |
| FSGSNSGNTA TLTISGTHTV DEAHYYCQAW DTSTAGFGGG TKLTVL | 106 |
| M12-D05 HC | |
| EVQLLESGGG LVQPGGSLRL SCAASGFTFS WYTMVWVRQA PGKGLEWVSR IYPSGGWTKY | 60 |
| ADSVKGRFTI SRDNSKNTLY LQMNSLRAED TATYYCAREG LLWFGENAFD IWGQGTMVTV | 120 |
| SSASTKGPSV FPLAPSSKS | 139 |
| M27-E05 LC | |
| QSELTQPPSV SVSPGQTASI TCSGDKLGDK YACWYQQKPG QSPVLVIYQD SKRPSGIPER | 60 |
| FSGSNSGNTA TLTISGTQAM DEADYYCQAW DSSTGVFGGG TKLTVL | 106 |
| M27-E05 HC | |
| EVQLLESGGG LVQPGGSLRL SCAASGFTFS WYLMIWVRQA PGKGLEWVSY IYPSGGFTYY | 60 |
| ADSVKGRFTI SRDNSKNTLY LQMNSLRAED MAVYYCARTE GPLSWGYGMD VWGQGTTVTV | 120 |
| SSASTKGPSV FPLAPSSKS | 139 |
| M28-B11 LC | |
| QSVLTQPPSV SVSPGQTATI TCSGDQLGDK YVGWYQQKPG QSPILVIYQD TKRPSGIPER | 60 |
| FSGSNSGNTA TLTISGTHTV DEAHYYCQAW DTSTAGFGGG TKLTVL | 106 |
| M28-B11 HC | |
| EVQLLESGGG LVQPGGSLRL SCAASGFTFS WYTMVWVRQA PGKGLEWVSR IYPSGGWTKY | 60 |
| ADSVKGRFTI SRDNSKNTLY LQMNSLRAED TATYYCAREG LLWFGENAFD IWGQGTMVTV | 120 |
| SSASTKGPSV FPLAPSSKS | 139 |
| M29-D09 LC | |
| QSALTQPPTV SVSPGQTARI TCSGNKLGDK YVAWYQQKPG QSPMLVIYQD TKRPSRVSER | 60 |
| FSGSNSANTA TLSISGTQAL DEADYYCQAW DSSIVIFGGG TRLTVL | 106 |
| M29-D09 HC | |
| EVQLLESGGG LVQPGGSLRL SCAASGFTFS WYTMVWVRQA PGKGLEWVSY IYPSGGATFY | 60 |
| ADSVKGRFTI SRDNSKNTLY LQMNSLRAED TAVYYCAMGS YDYIWGFYSD HWGQGTLVTV | 120 |
| SSASTKGPSV FPLAPSSKS | 139 |
| M29-E09 LC | |
| QYELTQPPSV SVSPGQTATI TCSGDNLGNK YNSWYQQKPG QSPLLVIYQD TKRPSAIPER | 60 |
| FSGSNSGNTA TLTISGTQAM DEADYYCQAW DGNVVFGGGT KLTVL | 105 |
| M29-E09 HC | |
| EVQLLESGGG LVQPGGSLRL SCAASGFTFS WYEMGWVRQA PGKGLEWVSS IYSSGGGTMY | 60 |
| ADSVKGRFTI SRDNSKNTLY LQMNSLRAED TAVYYCARNP QYSGYDRSLS DGAFDIWGQG | 120 |
| TMVTVSSAST KGPSVFPLAP SSKS | 144 |
| M35-G04 LC | |
| QDIQMTQSPA TLSLSPGERA TLSCRASQSV SSYLAWYQQK PGQAPRLLIY DASNRATGIP | 60 |
| ARFSGSGSGT DFTLTISSLE PEDFAVYYCQ QRSNWPRGFT FGPGTKVDIK | 110 |
| M35-G04 HC | |
| EVQLLESGGG LVQPGGSLRL SCAASGFTFS YYHMSWVRQA PGKGLEWVSV ISPSGGSTKY | 60 |
| ADSVKGRFTI SRDNSKNTLY LQMNSLRAED TAVYYCARGG SSDYAWGSYR RPYYFDYWGQ | 120 |
| GTLVTVSSAS TKGPSVFPLA PSSKS | 145 |
| M38-F02 LC | |
| QSVLTQPPSV SVSPGQTASI TCSGEKLGDK YVSWYQQKPG QSPSLVICED SRRPSGIPER | 60 |
| FSGSNSGNTA TLTISGAQPM DEADYYCQAW DSSTAIFGPG TKVTVL | 106 |
| M38-F02 HC | |
| EVQLLESGGG LVQPGGSLRL SCAASGFTFS YYMMVWVRQA PGKGLEWVSY IYSSGGHTVY | 60 |
| ADSVKGRFTI SRDNSKNTLY LQMNSLRAED TAVYYCARDL FLYDFWSKGA FDIWGQGTMV | 120 |
| TVSSASTKGP SVFPLAPSSK S | 141 |
| M41-A11 LC | |
| QSVLTQPPSV SVSPGQTASI TCSGDKLGDK YTSWYQQRPG QSPVLVIYQD IKRPSGIPER | 60 |
| FSGSNSGNTA TLTISGTQAM DEADYYCQAW DSPNARVFGS GTKVTVL | 107 |
| M41-A11 HC | |
| EVQLLESGGG LVQPGGSLRL SCAASGFTFS HYRMSWVRQA PGKGLEWVSS IYPSGGRTVY | 60 |
| ADSVKGRFTI SRDNSKNTLY LQMNSLRAED TAVYYCAKDK FEWRLLFRGI GNDAFDIWGQ | 120 |
| GTMVTVSSAS TKGPSVFPLA PSSKS | 145 |
| M73-D06 LC | |
| QSELTQPPSA SETPGQRVTI SCSGSSSNIG SNTVSWFQQL PGSAPRLLIY NDHRRPSGVP | 60 |
| DRFSGSKSGT SASLVISGLQ SQDEADYYCS AWDDSLNGVV FGGGTKLTVL | 110 |
| M73-D06 HC | |
| EVQLLESGGG LVQPGGSLRL SCAASGFTFS RYEMYWVRQA PGKGLEWVSS ISSSGGPTAY | 60 |
| ADSVKGRFTI SRDNSKNTLY LQMNSLRAED TAMYYCAKGT PKWELLLRSI YIENAFDIWG | 120 |
| QGTMVTVSSA STKGPSVFPL APSSKS | 146 |
| M76-D01 LC | |
| QDIVMTQTPP SLPVNPGEPA SISCRSSQSL SDDGNTYLDW YLQRPGQSPQ LLIHTLSYRA | 60 |
| SGVPDRFSGS GSGTDFTLKI SRVEAEDVGV YYCMQGTHWP PTFGQGTKVE IK | 112 |
| M76-D01 HC | |
| EVQLLESGGG LVQPGGSLRL SCAASGFTFS FYAMHWVRQA PGKGLEWVSG IVPSGGRTHY | 60 |
| ADSVKGRFTI SRDNSKNTLY LQMNSLRAED TAVYYCATDS SGSPNPLFDY WGQGTLVTVS | 120 |
| SASTKGPSVF PLAPSPKS | 138 |
| M110-C12 LC | |
| QDIQMTQSPL SLSVTPGEPA SISCRSSLSL LHSNGYNYLD WYVQRPGQSP QLLMYLSSTR | 60 |
| ASGVPDRFSG SGSGTDFTLE ISRVEAEDVG VYYCMQPLET PPTFGGGTKV EIK | 113 |
| M110-C12 HC | |
| EVQLLESGGG LVQPGGSLRL SCAASGFTFS YYEMDWVRQA PGKGLEWVSG ISSSGGHTAY | 60 |
| ADSVKGRFTI SRDNSKNTLY LQMNSLRAED TATYYCARER RSSSRARYYY GMDVWGQGTT | 120 |
| VTVSSASTKG PSVFPLAPSS KS | 142 |
| M137-E12 LC | |
| QSVLIQPPSV SGIPGQRVTI SCSGNNSNFG SNTVTWYQQL PGTAPKLLIY SDSRRPSGVP | 60 |
| DRFSGSRSDT SASLAISGLQ SEDEAEYHCA AWDDSLNGVF GGGTKLTVL | 109 |
| M137-E12 HC | |
| EVQLLESGGG LVQPGGSLRL SCAASGFTFS DYRMQWVRQA PGKGLEWVSV IVPSGGNTMY | 60 |
| ADSVKGRFTI SRDNSKNTLY LQMNSLRAED TAVYYCARGG PGSSIAARRA PTGYYGMDVW | 120 |
| GQGTTVTVSS ASTKGPSVFP LAPSSKS | 147 |
| M142-H08 LC | |
| QDIQMTQSPS SLSAFVGDRV TITCRASQPI DNYLNWYHQK PGKAPKLLIY AASRLQSGVP | 60 |
| SRLSGSGFGT DFTLTISSLQ PEDFGNYYCQ QSYTVPYTFG GGTKVEIR | 108 |
| M142-H08 HC | |
| EVQLLESGGG LVQPGGSLRL SCAASGFTFS AYSMIWVRQA PGKGLEWVSY IRPSGGRTTY | 60 |
| ADSVKGRFTI SRDNSKNTLY LQMNSLRAED TAVYYCARGG LLLWFRELKS NYFDYWGQGT | 120 |
| LVTVSSASTK GPSVFPLAPS SKS | 143 |
| M145-D01 LC | |
| QDIQMTQSPA TLSLSPGERA TLSCRASQSV SSYLAWYQQK PGQAPRLLIY DASNRATGIP | 60 |
| ARFSGSGSGT DFTLTISSLE PEDFAVYYCQ QRSNWPRGFT FGPGTKVDIK | 110 |
| M145-D01 HC | |
| EVQLLESGGG LVQPGGSLRL SCAASGFTFS YYHMSWVRQA PGKGLEWVSV ISPSGGSTKY | 60 |
| ADSVKGRFTI SRDNSKNTLY LQMNSLRAED TAVYYCARGG SSDYAWGSYR RPYYFDYWGQ | 120 |
| GTLVTVSSAS TKGPSVFPLA PSSKS | 145 |
| M145-D11 LC | |
| QSVLTQPPSV SVSPGQTASI TCSGDKLGDK YTSWYQQRPG QSPVLVIYQD IKRPSGIPER | 60 |
| FSGSNSGNTA TLTISGTQAM DEADYYCQAW DSPNARVFGS GTKVTVL | 107 |
| M145-D11 HC | |
| EVQLLESGGG LVQPGGSLRL SCAASGFTFS HYRMSWVRQA PGKGLEWVSS IYPSGGRTVY | 60 |
| ADSVKGRFTI SRDNSKNTLY LQMNSLRAED TAVYYCAKDK FEWRLLFRGI GNDAFDIWGQ | 120 |
| GTMVTVSSAS TKGPSVFPLA PSSKS | 145 |
| M146-E12 LC | |
| QDIQMTQSPS SLSASVGDRV TITCRASGDI GNALGWYQQK PGKAPRLLIS DASTLQSGVP | 60 |
| LRFSGSGSGT EFTLTISSLQ PEDFATYYCL QGYNYPRTFG QGTKLEIR | 108 |
| M146-E12 HC | |
| EVQLLESGGG LVQPGGSLRL SCAASGFTFS RYIMHWVRQA PGKGLEWVSS ISPSGGLTSY | 60 |
| ADSVKGRFTI SRDNSKNTLY LQMNSLRAED TAVYYCAREF ENAYHYYYYG MDVWGQGTTV | 120 |
| TVSSASTKGP SVFPLAPSSK S | 141 |
| M152-A12 LC | |
| QDIQMTQSPS SLSASVGDRV TITCRASQSI SSYLSWYQQR PGKAPNLLIY AASSLQSGVP | 60 |
| SRFSGSGSGT DFTLTISSLQ PEDFATYYCQ QSISIPRTFG QGTKVEVK | 108 |
| M152-A12 HC | |
| EVQLLESGGG LVQPGGSLRL SCAASGFTFS PYFMGWVRQA PGKGLEWVSG IGPSGGSTTY | 60 |
| ADSVKGRFTI SRDNSKNTLY LQMNSLRAED TAVYYCAREG PPYSSGWYRG LRQYHFDYWG | 120 |
| QGTLVTVSSA STKGPSVFPL APSSKS | 146 |
| M160-G12 LC | |
| QDIQMTQSPS FLSASVGDRV TITCRASQGI SSYLAWYQQK PGKAPKLLIY AASTLQSGVP | 60 |
| SRFSGSGSGT EFTLTISSLQ PEDFATYYCQ QLNSYPLTFG GGTKVEIK | 108 |
| M160-G12 HC | |
| EVQLLESGGG LVQPGGSLRL SCAASGFTFS HYLMTWVRQA PGKGLEWVSY ISPSGGHTIY | 60 |
| ADSVKGRFTI SRDNSKNTLY LQMNSLRAED TAVYYCARVA RGIAARSRTS YFDYWGQGTL | 120 |
| VTVSSASTKG PSVFPLAPSS KS | 142 |
| M161-C11 LC | |
| QSALTQPPSV SVSPGQTASI TCSGDKLGDK YVSWYQQRPG QSPVLVIYQD TKRPSGIPER | 60 |
| FSGSNSGNTA TLTISGTQAV DEADYYCQAW DSSTYVFGGG TKVTVL | 106 |
| M161-C11 HC | |
| EVQLLESGGG LVQPGGSLRL SCAASGFTFS DYAMKWVRQA PGKGLEWVSS ISSSGGVTQY | 60 |
| ADSVKGRFTI SRDNSKNTLY LQMNSLRAED TAVYYCAREE DYSSSWYSRR FDYYYGMDVW | 120 |
| GQGTTVTVSS ASTKGPSVFP LAPSSKS | 147 |
| M162-A04 LC | |
| QDIQMTQSPS TLSASVGDRV TITCRASQSI SSWLAWYQQK PGKAPNLLIY KASTLESGVP | 60 |
| SRFSGSGSGT EFTLTISSLQ PDDFATYYCQ QYNTYWTFGQ GTKVEIK | 107 |
| M162-A04 HC | |
| EVQLLESGGG LVQPGGSLRL SCAASGFTFS HYIMMWVRQA PGKGLEWVSG IYSSGGITVY | 60 |
| ADSVKGRFTI SRDNSKNTLY LQMNSLRAED TAVYYCAYRR TGIPRRDAFD IWGQGTMVTV | 120 |
| SSASTKGPSV FPLAPSSKS | 139 |
| X67-B03 LC | |
| QDIQMTQSPS SLSAFVGDRV TITCRASQPI DNYLNWYHQK PGKAPKLLIY AASRLQSGVP | 60 |
| SRLSGSGFGT DFTLTISSLQ PEDFGNYYCQ QSYTVPYTFG GGTKVEIR | 108 |
| X67-B03 HC | |
| EVQLLESGGG LVQPGGSLRL SCAASGFTFS AYSMIWVRQA PGKGLEWVSY IRPSGGRTTY | 60 |
| ADSVKGRFTI SRDNSKNTLY LQMNSLRAED TAVYYCARGG LLLWSRELKS NYFDYWGQGT | 120 |
| LVTVSSASTK GPSVFPLAPS SKS | 143 |
| X67-C03 LC | |
| QDIQMTQSPS SLSAFVGDRV TITCRASQPI DNYLNWYHQK PGKAPKLLIY AASRLQSGVP | 60 |
| SRLSGSGFGT DFTLTISSLQ PEDFGNYYCQ QSYTVPYTFG GGTKVEIR | 108 |
| X67-C03 HC | |
| EVQLLESGGG LVQPGGSLRL SCAASGFTFS AYSMIWVRQA PGKGLEWVSY IRPSGGRTTY | 60 |
| ADSVKGRFTI SRDNSKNTLY LQMNSLRAED TAVYYCARGG LLLWMRELKS NYFDYWGQGT | 120 |
| LVTVSSASTK GPSVFPLAPS SKS | 143 |
| X67-C09 LC | |
| QDIQMTQSPS SLSAFVGDRV TITCRASQPI DNYLNWYHQK PGKAPKLLIY AASRLQSGVP | 60 |
| SRLSGSGFGT DFTLTISSLQ PEDFGNYYCQ QSYTVPYTFG GGTKVEIR | 108 |
| X67-C09 HC | |
| EVQLLESGGG LVQPGGSLRL SCAASGFTFS AYSMIWVRQA PGKGLEWVSY IRPSGGRTTY | 60 |
| ADSVKGRFTI SRDNSKNTLY LQMNSLRAED TAVYYCARGG LLLWGRELKS NYFDYWGQGT | 120 |
| LVTVSSASTK GPSVFPLAPS SKS | 143 |
| X67-D03 LC | |
| QDIQMTQSPS SLSAFVGDRV TITCRASQPI DNYLNWYHQK PGKAPKLLIY AASRLQSGVP | 60 |
| SRLSGSGFGT DFTLTISSLQ PEDFGNYYCQ QSYTVPYTFG GGTKVEIR | 108 |
| X67-D03 HC | |
| EVQLLESGGG LVQPGGSLRL SCAASGFTFS AYSMIWVRQA PGKGLEWVSY IRPSGGRTTY | 60 |
| ADSVKGRFTI SRDNSKNTLY LQMNSLRAED TAVYYCARGG LLLWNRELKS NYFDYWGQGT | 120 |
| LVTVSSASTK GPSVFPLAPS SKS | 143 |
| X67-E04 LC | |
| QDIQMTQSPS SLSAFVGDRV TITCRASQPI DNYLNWYHQK PGKAPKLLIY AASRLQSGVP | 60 |
| SRLSGSGFGT DFTLTISSLQ PEDFGNYYCQ QSYTVPYTFG GGTKVEIR | 108 |
| X67-E04 HC | |
| EVQLLESGGG LVQPGGSLRL SCAASGFTFS AYSMIWVRQA PGKGLEWVSY IRPSGGRTTY | 60 |
| ADSVKGRFTI SRDNSKNTLY LQMNSLRAED TAVYYCARGG LLLWDRELKS NYFDYWGQGT | 120 |
| LVTVSSASTK GPSVFPLAPS SKS | 143 |
| X67-F01 LC | |
| QDIQMTQSPS SLSAFVGDRV TITCRASQPI DNYLNWYHQK PGKAPKLLIY AASRLQSGVP | 60 |
| SRLSGSGFGT DFTLTISSLQ PEDFGNYYCQ QSYTVPYTFG GGTKVEIR | 108 |
| X67-F01 HC | |
| EVQLLESGGG LVQPGGSLRL SCAASGFTFS AYSMIWVRQA PGKGLEWVSY IRPSGGRTTY | 60 |
| ADSVKGRFTI SRDNSKNTLY LQMNSLRAED TAVYYCARGG LLLWQRELKS NYFDYWGQGT | 120 |
| LVTVSSASTK GPSVFPLAPS SKS | 143 |
| X67-F10 LC | |
| QDIQMTQSPS SLSAFVGDRV TITCRASQPI DNYLNWYHQK PGKAPKLLIY AASRLQSGVP | 60 |
| SRLSGSGFGT DFTLTISSLQ PEDFGNYYCQ QSYTVPYTFG GGTKVEIR | 108 |
| X67-F10 HC | |
| EVQLLESGGG LVQPGGSLRL SCAASGFTFS AYSMIWVRQA PGKGLEWVSY IRPSGGRTTY | 60 |
| ADSVKGRFTI SRDNSKNTLY LQMNSLRAED TAVYYCARGG LLLWTRELKS NYFDYWGQGT | 120 |
| LVTVSSASTK GPSVFPLAPS SKS | 143 |
| X67-G04 LC | |
| QDIQMTQSPS SLSAFVGDRV TITCRASQPI DNYLNWYHQK PGKAPKLLIY AASRLQSGVP | 60 |
| SRLSGSGFGT DFTLTISSLQ PEDFGNYYCQ QSYTVPYTFG GGTKVEIR | 108 |
| X67-G04 HC | |
| EVQLLESGGG LVQPGGSLRL SCAASGFTFS AYSMIWVRQA PGKGLEWVSY IRPSGGRTTY | 60 |
| ADSVKGRFTI SRDNSKNTLY LQMNSLRAED TAVYYCARGG LLLWARELKS NYFDYWGQGT | 120 |
| LVTVSSASTK GPSVFPLAPS SKS | 143 |
| X67-H04 LC | |
| QDIQMTQSPS SLSAFVGDRV TITCRASQPI DNYLNWYHQK PGKAPKLLIY AASRLQSGVP | 60 |
| SRLSGSGFGT DFTLTISSLQ PEDFGNYYCQ QSYTVPYTFG GGTKVEIR | 108 |
| X67-H04 HC | |
| EVQLLESGGG LVQPGGSLRL SCAASGFTFS AYSMIWVRQA PGKGLEWVSY IRPSGGRTTY | 60 |
| ADSVKGRFTI SRDNSKNTLY LQMNSLRAED TAVYYCARGG LLLWERELKS NYFDYWGQGT | 120 |
| LVTVSSASTK GPSVFPLAPS SKS | 143 |

Note:
X81-B01 is a germilined IgG derived from X63-G06 which is shown in Table 7.

TABLE 2
CDR Amino Acid Sequences and ELISA Signal of Antibody Binders of PKal

| | Human | | | | | | |
|---|---|---|---|---|---|---|---|
| | pKal | | | | | | |
| Initial | ELISA | | | | | | |
| Name | (T/B) | LV-CDR1 | LV-CDR2 | LV-CDR3 | HV-CDR1 | HV-CDR2 | HV-CDR3 |
| M6-A06 | 11.7 | RASQSISMYLN | GTSSLQS | QQSYSAPWT | LYQMT | GIWPSGGFTDYADSVKG | VSTAVADNDY |
| M6-A08 | 23.4 | RASQRISFYLN | GASSLQS | QQTFSTPNT | PYPMQ | SISSSGGMTEYADSVKG | DDYGGKGGAFDI |
| M6-D03 | 15.5 | RASQSISSYLN | AASSLQS | QQSYSTLWT | KYFMG | VIGSSGGWTSYADSVKG | VSTAVADNDY |
| M6-D08 | 16 | RASQSISSYLN | GASSLQS | QQSYTRWT | RYHMV | SISPSGGWTNYADSVKG | EMATIAGQFDP |
| M6-G05 | 18.5 | RASQSISTYLN | NAFSMER | QQSYTTPTT | RYRMV | SIYPSGGMTAYADSVKG | DAVGIGDAFDI |
| M8-C04 | 44.7 | SGDKLGDKYTS | QDSKRPS | QAWDSSTV | YYPMQ | YIYPSGGLTSYADSVKG | LFYGSGSVGFEY |
| M8-D05 | 11.9 | RASQDISSWLV | DASNLQS | QQADGFPLT | LYNMN | SISPSGGFTDYADSVKG | DLDLGILDY |
| M8-E06 | 8.8 | RASQSISSYLN | AASSLQS | QQSYSTLMYT | HYFMT | SIVPSGGMTQYADSVKG | DSYSSSWFDI |
| M8-G09 | 28.2 | RASQGVSYYLA | GASSLQS | QQYNTYPPT | LYEML | VIYPSGGYTDYADSVKG | SFSGFGEIDY |
| M8-H04 | 3.3 | RASQYISTYLN | GTSSLQS | QQSFTTPFT | GYWMG | SISSSGGWTQYADSVKG | DDEIAAGGAFDI |
| M9-A03 | 14.4 | RASQNIDIYLN | GAYNLQS | QQSYGTPV | GYFMM | SIYSSGGYTDYADSVKG | EVAGTYAFDI |
| M9-A08 | 5.5 | RASQRISTYLN | GASSLQS | QQSYNTPRT | AYEMW | YIGSSGGSTSYADSVKG | GNSSSFDAFDI |
| M9-C08 | 10.9 | RASQSISIYVN | AASSLQR | QQSFSTPLT | HYGMV | YIVPSGGLTYYADSVKG | VDYTGDGLGY |
| M9-C10 | 7.8 | RASQGISSYLN | GASSLQS | QESYSTLFT | LYPMQ | SIGSSGGMTFYADSVKG | EVGAAGFAFDI |
| M9-D08 | 35.9 | RASRTISFYLN | GGSSLHS | QQSFSSPWT | WYKMM | SIYPSGGWTNYADSVKG | GSPWGDDAFDI |
| M9-E04 | 18.8 | RASQSISGYLN | AASNLQT | QQSHTPPKT | EYDMM | SIGSSGGMTYYADSVKG | DQVAAAAIDY |
| M9-F08 | 10.9 | RASQSISSYLN | AASSLQS | QQSYSTPPYT | PYAMT | VIYPSGGFTDYADSVKG | ASGSYLDAFDI |
| M9-F09 | 7 | RASQSISSYLN | AASSLQS | QQTYTTPWT | SYPMG | RISSSGGMTIYADSVKG | DDWNVGMDV |
| M9-F10 | 8.4 | RASQSINTYLN | AASTLES | QQSYSTPYT | DYDME | SISPSGGSTIYADSVKG | QGLLTAFDI |
| M9-G08 | 4.8 | RASQSISSYLN | AASSLQS | QQSYSTPIT | YYTML | SIYPSGGFTMYADSVKG | VDTAMAMIDY |
| M9-H02 | 3.5 | RASRSIATYLN | GASTLQS | QQSFSDPYT | AYMMI | VIYPSGGVTMYADSVKG | GTVGASDAFDI |
| M9-H03 | 4.4 | SGDKLGNRYTS | QDNKRPS | QALDSNTYV | WYSMG | YIVPSGGYTMYADSVKG | DPGVSYYYYGMDV |
| M9-H04 | 16.1 | RASQSISSYLN | AASSLQS | QQSYSTPPT | AYTMW | SIWPSGGSTFYADSVKG | TYDSSAGEVDY |
| M10-A03 | 33.7 | RASQRISFYLN | GASSLQS | QQTFSTPNT | PYPMQ | SISSSGGMTEYADSVKG | DDYGGKGGAFDI |
| M10-A12 | 20.8 | RASRDISVYLN | GASSLQS | QQSYSIPFT | LYLMH | SIYSSGGFTTYADSVKG | DTDYGMDV |
| M10-B09 | 14.1 | RASQSISTYLN | GASSLQS | QQSFSTPWT | WYEMS | RIWPSGGVTMYADSVKG | TSITTVGMDV |
| M10-C11 | 5.3 | RASQSISIYLN | AASTLQS | QQSHSIPPT | MYPMM | YISPSGGMTDYADSVKG | VAGSSDAFDI |
| M10-D11 | 6.4 | RSSQSLLHSNGYNYLD | LGSNRAS | MQALQTPLT | AYPMN | RISSSGGNTSYADSVKG | GYLGY |
| M10-E06 | 32.8 | RASQSISTYLN | GASSLQS | QQSYSDPYT | LYRMF | SIWSSGGPTMYADSVKG | EYPSTYYFDY |
| M10-F09 | 4.8 | RASQTIDDDLI | AASSLQS | QQSYNIPRT | NYDMM | YISPSGGFTRYADSVKG | DIYYYNWGPSHYFDS |
| M10-G09 | 7.1 | RASQSISGYIN | AASSLQS | QQYVSYPFT | QYGMQ | SIRSSGGATRYADSVKG | DGYYDSSGYPDY |
| M11-A10 | 25 | RASQSIDTYLN | DASNL | QHYLYAPYS | NYWMM | GIGSSGGFTSYADSVKG | GSYSDYGVFES |
| M11-E01 | 11.7 | RASQSISSYLN | AASSLQS | QQSYSTPPT | TYEMY | GIGSSGGMTMYADSVKG | EQPGIAALQF |
| M11-E04 | 43.2 | RASQSISIYLT | GAATLQT | QQTFSLPRT | MYHMN | GIVSSGGVTFYADSVKG | ITTVTTGGAFDI |
| M11-E05 | 41.4 | RTSQTINNYLN | ATHTLES | QQSFAFPYT | WYTMG | WIYFGGLTTYADSVKG | LGGPLDAFDI |
| M11-E06 | 12.6 | RASRGIGTYLN | AASSLET | QESFTNVYN | QYAMH | SIYPSGGFTLYADSVKG | GGWLAGGELLN |
| M11-G09 | 23.6 | RTSQGINHYLN | AASELQT | QQTYTSPYT | LYNMT | YIYPSGGGTHYADSVKG | DTGFWSADAFDI |
| M11-G12 | 4.9 | RASQTISVYVN | GASSLQS | QQSYSIPFT | QYPMN | SISSSGGFTTYADSVKG | EEQQGGFDY |
| M12-A08 | 40.4 | RASQSISRYLN | AASTLET | QQSYSTPYT | WYYMG | WIVSSGGLTLYADSVKG | TTVTTGDAFDI |
| M12-B04 | 18 | RASQGIRNDLG | AASILQS | LQDYEYPLT | LYSMY | RIRPSGGGTVYADSVKG | DPLYSSGDV |
| M12-C09 | 7 | RASQSIGIYLN | GASSLQS | QHSYSTPFT | SYAMV | SIGSSGGFTLYADSVKG | MNLGGGDAFDI |
| M12-C10 | 8.3 | SGDKLGEKYVS | QDNKRPS | QAWDSYTVV | DYEMH | GISPSGGKTQYADSVKG | DLKWGGRGSPDWYFDL |
| M12-D10 | 9.9 | RASQSISSYLN | AASSLQS | QQSYSTPPT | NYPMD | SISSSGGWTNYADSVKG | DTSGSYLGFDY |
| M12-E06 | 48 | RASQSISTYLN | GAFSLQS | QQSHSTPPT | QYKML | GIGPSGGLTAYADSVKG | APWFGELGMDV |
| M27-A10 | 3.2 | RASQSISAYLN | YGVGSLQS | QQGYTTPVT | WYRMD | SIWPSGGLTSYADSVKG | GWAPGGDAFDI |
| M27-B01 | 33.1 | RASQSISSYLN | AASSLQS | QQSYSTPYT | DYTMW | SISSSGGITFYADSVKG | SADTAMGGAFDI |
| M27-B12 | 2.3 | SGDKLGDEYAA | QDRKRPS | QAWGKRNVV | WYQMM | SISPSGGITEYADSVKG | DRSSGWYYYGMDV |
| M27-E03 | 35.9 | RASQSISSYLN | AASSLQS | QQSYSTPRT | SYMMH | GIYPSGGWTDYADSVKG | LVAGLDAFDI |
| M27-F04 | 10.5 | RASQSISSYLN | AASSLQS | QQSYSTPPT | WYPMT | SIGPSGGQTIYADSVKG | EYGDYGGGFDP |
| M27-F11 | 10 | RASQGISSYLA | AASSLQS | QQSYNTLRT | SYHMM | SIYPSGGATMYADSVKG | DGYHYGDYTYFQH |
| M27-G01 | 31.4 | RASQSISTYLN | GASSLQS | QQSYSDPYT | LYRMF | SIWSSGGPTMYADSVKG | EYPSTYYFDY |
| M27-G04 | 4.1 | RASQRISYYLT | AASSLES | QQAFSTPFT | AYYMV | YISPSGGQTQYADSVKG | EAISSSSFDY |
| M27-G09 | 2.2 | RTRQSISNYLN | AASSLQS | QQSYDIPFT | EYDMA | YIVSSGGFTSYADSVKG | WAGWIAAADY |
| M27-H10 | 12.4 | RASQSISNYLN | AASSLQS | QQSYSTPQT | AYQMA | VIYSSGGYTDYADSVKG | HNWNDGAFDI |
| M28-A01 | 19 | RASQSISSYLN | AASSLQS | QQSYSTLT | WYAMH | GIYSSGGYTKYADSVKG | DLSNGDDVFDI |
| M28-C03 | 2.2 | RASQSINFYLN | VASSLES | LQSYSAPYT | YYQMG | SIYPSGGMTDYADSVKG | GSPWGDDAFDI |
| M28-D02 | 3.7 | RTSRRIGTYLN | GASSLQS | QQSFSSPWT | WYPMQ | YIYPSGGGTDYADSVKG | SSGWLGDAFDI |
| M28-D12 | 41.6 | RASQSIATYLN | AASSLQS | QQSYSTRET | WYTMH | VIYPSGGPTSYADSVKG | DGSGSYLGFDY |
| M28-E01 | 41 | RASQSISSYLN | AASSLQS | QQTYTTPWT | SYPMG | RISSSGGMTIYADSVKG | DDWNVGMDV |
| M28-E11 | 29.3 | RASQDISNWLA | AASSLQT | QQSYSLPWT | LYDMT | GISSSGGVTIYADSVKG | TYYYDSSGYADAFDI |
| M28-F01 | 1.5 | RASQSINTYLN | AASTLES | QQSYSTPPT | VYLMH | GISPSGGYTQYADSVKG | PGGLDAFDI |
| M28-F05 | 31.4 | RASQSISSYLN | AASSLQS | QQSYSTPLT | RYIMW | GIYSSGGYTQYADSVKG | ELEGLGGFDY |
| M28-F07 | 33 | RASQGISSWLA | ATSGLQS | QQAKSFPLT | DYTMY | SIVPSGGHTLYADSVKG | DHLSSWYGGFFDY |
| M29-C07 | 5.2 | RASQSISSYLN | AASSLQS | QQSYSTRYT | GYDMM | VISSSGGNTAYADSVKG | ESSGLYYFDY |
| M29-D10 | 23.6 | RASQSITIYLN | GASNLHS | QQSYDTPLT | WYPMY | SIGSSGGPTPYADSVKG | WADYGGSLDY |
| M29-E02 | 2 | SGSSSNIGNNAVS | YDDLLPS | AAWDDSLNGFV | RYPMM | VIYPSGGDTFYADSVKG | GDDYLWEAAVY |
| M29-G08 | 40.4 | RASQNIGNDVA | HASTRAY | QQFYDWPAHT | YYHMW | GISPSGGFTFYADSVKG | DYYYDSSGYSPLGY |
| M29-G10 | 16.4 | RASQSISIYLN | GASQLES | QQSYNVPYT | FYKMI | SISSSGGSTQYADSVKG | DRVDLGYLDY |
| M74-A07 | 8.6 | RTSQNINTYLN | GVSSLHR | QQSYSSPWT | QYLMM | SIYPSGGYTSYADSVKG | VSTAVADNDY |
| M76-F02 | 6.4 | RASQTIDNYLH | DASSLQS | QQSYDTPQYT | LYDMN | GISPSGGQTMYADSVKG | QPMISAFDI |
| M76-G02 | 10.3 | RASQSISSYLN | AASSLQS | QQSYSTPPWT | LYAMW | YISSSGGFTSYADSVKG | YRVGVAATDY |
| M76-G06 | 11.8 | RASQSISTYLN | AASSLQS | QQSYSTPHT | GYIMH | WIYPSGGWTEYADSVKG | DAPGVGAIDY |
| M76-H02 | 13.4 | RASQDISVYLN | GGASLQS | QQSYSLPFT | MYWMQ | YIYPSGGPTKYADSVKG | PSGSYGDAFDI |
| M77-C07 | 16.1 | RASQNISSYLN | AASSLQS | QQSYSTPRT | LYIMG | GIYPSGGFTMYADSVKG | ESSGVAAPDY |
| M77-H04 | 7.6 | RSSQSLLHSRGYNYLD | LGSNRAS | MQALQRRT | YYTMI | GIRSSGGGTRYADSVKG | DGSRYSYGSIYYYYGMDA |

Abbreviations used:
“T/B” is the ELISA signal obtained using of the “target” (biotinylated plasma kallikrein) divided by the ELISA signal of the “background” (streptavidin); both of which were coated on microtiter plates.
“nd” is not determined.
The symbol “q” refers to the amber suppressible stop codon (TAG), which is translated as glutamine (Q) in strains of E. coli such as the TG1 cells that were used to express the Fab fragments.

[0860] Amino acid sequences of light chain (LC) and heavy chain (HC) variable domain of pKal antibody binders are shown below.

| M6-A06 LC | |
|---|---|
| QDIQMTQSPS SLSASVGDSV TISCRASQSI SMYLNWYQHK PGKAPKLLIY GTSSLQSGVP | 60 |

| | |
|---|---|
| SRFSGSGPGG TDFTLTISSL QPEDFATYYC QQSYSAPWTF GQGTKVEIK | 109 |

| | |
|---|---|
| M6-A06 HC | |
| EVQLLESGGG LVQPGGSLRL SCAASGFTFS LYQMTWVRQA PGKGLEWVSG IWPSGGFTDY | 60 |
| ADSVKGRFTI SRDNSKNTLY LQMNSLRAED TAVYYCARVS TAVADNDYWG QGTLVTVSSA | 120 |
| STKGPSVFPL APSSKS | 136 |
| M6-A08 LC | |
| QDIQMTQSPS SLSASVGDRV TITCRASQRI SFYLNWFQQK PGKAPNLLIY GASSLQSGVP | 60 |
| SRFSGSGSGT DFTLTISSLQ PKDFGTYYCQ QTFSTPNTFG QGTKLEIK | 108 |
| M6-A08 HC | |
| EVQLLESGGG LVQPGGSLRL SCAASGFTFS PYPMQWVRQA PGKGLEWVSS ISSSGGMTEY | 60 |
| ADSVKGRFTI SRDNSKNTLY LQMNSLRAED TAVYYCARDD YGGKGGAFDI WGQGTMVTVS | 120 |
| SASTKGPSVF PLAPSSKS | 138 |
| M6-D03 LC | |
| QDIQMTQSPS SLSASVGDRV TITCRASQSI SSYLNWYQQK PGKAPKLLIY AASSLQSGVP | 60 |
| SRFSGSGSGT DFTLTISSLQ PEDFATYYCQ QSYSTLWTFG QGTKVEIK | 108 |
| M6-D03 HC | |
| EVQLLESGGG LVQPGGSLRL SCAASGFTFS KYFMGWVRQA PGKGLEWVSV IGSSGGWTSY | 60 |
| ADSVKGRFTI SRDNSKNTLY LQMNSLRAED TAVYYCARVS TAVADNDYWG QGTLVTVSSA | 120 |
| STKGPSVFPL APSSKS | 136 |
| M6-D08 LC | |
| QDIQMTQSPS SLSASVGDRV TITCRASQSI SSYLNWYqQK PGKAPKLLIY GASSLQSGVP | 60 |
| SRFSGSGSGT DFTLTISSLQ PEDSATYYCQ QSYTRWTFGQ GTKVEIK | 107 |
| M6-D08 HC | |
| EVQLLESGGG LVQPGGSLRL SCAASGFTFS RYHMVWVRQA PGKGLEWVSS ISPSGGWTNY | 60 |
| ADSVKGRFTI SRDNSKNTLY LQMNSLRAED TAMYYCAREM ATIAGQFDPW GQGTLVTVSS | 120 |
| ASTKGPSVFP LAPSSKS | 137 |
| M6-G05 LC | |
| QDIQMTQSPS SLSASVGDRV TITCRASQSI STYLNWYQLK PGKAPKLLIY NAFSMERGVP | 60 |
| STISGSGSGT DFTLTISSLQ PEDFATYYCQ QSYTTPTTFG QGTKVEIK | 108 |
| M6-G05 HC | |
| EVQLLESGGG LVQPGGSLRL SCAASGFTFS RYRMVWVRQA PGKGLEWVSS IYPSGGMTAY | 60 |
| ADSVKGRFTI SRDNSKNTLY LQMNSLRAED TAVYYCARDA VGIGDAFDIW GQGTMVTVSS | 120 |
| ASTKGPSVFP LAPSSKS | 137 |
| M8-C04 LC | |
| QSALTQPPSV SVSPGQTASI TCSGDKLGDK YTSWHQQKPG QSPVLVIYQD SKRPSGIPER | 60 |
| FSGSNSGNTA TLTISGTQAM DEADYYCQAW DSSTVFGGGT RLTVL | 105 |
| M8-C04 HC | |
| EVQLLESGGG LVQPGGSLRL SCAASGFTFS YYPMQWVRQA PGKGLEWVSY IYPSGGLTSY | 60 |
| ADSVKGRFTI SRDNSKNTLY LQMNSLRAED TAVYYCARLF YGSGSVGFEY WGQGTLVTVS | 120 |
| SASTKGPSVF PLAPSSKS | 138 |
| M8-D05 LC | |
| QDIQMTQSPS FVSASVGDRV TITCRASQDI SSWLVWYQQK PGKGPKLLIY DASNLQSGVP | 60 |
| SRFSGGGSGT HFTLTISSLQ PEDFATYYCQ QADGFPLTFG GGTKVEMK | 108 |
| M8-D05 HC | |
| EVQLLESGGG LVQPGGSLRL SCAASGFTFS LYNMNWVRQA PGKGLEWVSS ISPSGGFTDY | 60 |
| ADSVKGRFTI SRDNSKNTLY LQMNSLRAED TAVYYCARDL DLGILDYWGQ GTLVTVSSAS | 120 |
| TKGPSVFPLA PSSKS | 135 |
| M8-E06 LC | |
| QDIQMTQSPS SLSASVGDRV TITCRASQSI SSYLNWYQQK PGKAPKLLIY AASSLQSGVP | 60 |
| SRFSGSGSGT DFTLTISSLQ PEDFATYYCQ QSYSTLMYTF GQGTKLEIK | 109 |
| M8-E06 HC | |
| EVQLLESGGG LVQPGGSLRL SCAASGFTFS HYFMTWVRQA PGKGLEWVSS IVPSGGMTQY | 60 |
| ADSVKGRFTI SRDNSKNTLY LQMNSLRAED TAVYYCARDS YSSSWFDIWG QGTMVTVSSA | 120 |
| STKGPSVFPL APSSKS | 136 |
| M8-G09 LC | |
| QDIQMTQSPS SLSASVGDTV TITCRASQGV SYYLAWFQQK PGKAPKSLIY GASSLQSGVP | 60 |
| SKFSGSGSGT VFTLTISSLQ PDDFATYYCQ QYNTYPPTFG QGTRLDIK | 108 |
| M8-G09 HC | |
| EVQLLESGGG LVQPGGSLRL SCAASGFTFS LYEMLWVRQA PGKGLEWVSV IYPSGGYTDY | 60 |
| ADSVKGRFTI SRDNSKNTLY LQMNSLRAED MAVYYCARSF SGFGEIDYWG QGTLVTVSSA | 120 |
| STKGPSVFPL APSSKS | 136 |
| M8-H04 LC | |
| QDIQMTQSPS SLSASIGDRV TITCRASQYI STYLNWYEQK PGKAPKLLIY GTSSLQSGVP | 60 |
| SRFSGSGSGT EFSLTISSLQ PEDFATYYCQ QSFTTPFTFG QGTKLEIK | 108 |
| M8-H04 HC | |
| EVQLLESGGG LVQPGGSLRL SCAASGFTFS GYWMGWVRQA PGKGLEWVSS ISSSGGWTQY | 60 |
| ADSVKGRFTI SRDNSKNTLY LQMNSLRAED TATYYCARDD EIAAGGAFDI WGQGAMVTVS | 120 |
| SASTKGPSVF PLAPSSKS | 138 |
| M9-A03 LC | |
| QDIQMTQSPS SLSASLGDRV TITCRASQNI DIYLNWYQQT PGKAPKLLIY GAYNLQSGVP | 60 |
| SRFSGSGSGT DFTLTISSLQ PEDFGTYYCQ QSYGTPVFGQ GTKLEIK | 107 |
| M9-A03 HC | |
| EVQLLESGGG LVQPGGSLRL SCAASGFTFS GYFMMWVRQA PGKGLEWVSS IYSSGGYTDY | 60 |
| ADSVKGRFTI SRDNSKNTLY LQMNSLRAED TAVYYCAREV AGTYAFDIWG QGTMVTVSSA | 120 |
| STKGPSVFPL APSSKS | 136 |
| M9-A08 LC | |
| QDIQMTQSPS SLSASVGDRV TVTCRASQRI STYLNWYQQK PGKAPKLLIS GASSLQSGVP | 60 |
| SRFSGSGSGT DFTLTISSLQ PDDFATYYCQ QSYNTPRTFG QGTKVEIR | 108 |
| M9-A08 HC | |
| EVQLLESGGG LVQPGGSLRL SCAASGFTFS AYEMWWVRQA PGKGLEWVSY IGSSGGSTSY | 60 |
| ADSVKGRFTI SRDNSKNTLY LQMNSLRAED TAVYYCTGGN SSSFDAFDIW GQGTMVTVSS | 120 |
| ASTKGPSVFP LAPSSKS | 137 |
| M9-C08 LC | |
| QDIQMTQSPS SLSASVGDRV TITCRASQSI SIYVNWYQQK PGKAPNLLIF AASSLQRGVP | 60 |
| SRFSGSGSGA DFTLTISSLQ PEDFATYYCQ QSFSTPLTFG GGTKVEIK | 108 |
| M9-C08 HC | |
| EVQLLESGGG LVQPGGSLRL SCAASGFTFS HYGMVWVRQA PGKGLEWVSY IVPSGGLTYY | 60 |
| ADSVKGRFTI SRDNSKNTLY LQMNSLRAED TAVYYCARVD YTGDGLGYWG QGTLVTVSSA | 120 |
| STKGPSVFPL APSSKS | 136 |
| M9-C10 LC | |
| QDIQMTQSPS SLSASVGDRV TITCRASQGI SSYLNWYQQK PGNAPNLLIY GASSLQSGVP | 60 |
| SRFSGSGSGT DFTLTISSLQ PEDFATYYCQ ESYSTLFTFG PGTTVEIK | 108 |
| M9-C10 HC | |
| EVQLLESGGG LVQPGGSLRL SCAASGFTFS LYPMQWVRQA PGKGLEWVSS IGSSGGMTFY | 60 |
| ADSVKGRFTI SRDNSKNTLY LQMNSLRAED TAVYYCTREV GAAGFAFDIW GQGTMVTVSS | 120 |
| ASTKGPSVFP LAPSSKS | 137 |
| M9-D08 LC | |
| QDIQMTQSPS SLSASVGDRV TLTCRASRTI SFYLNWYQQK AGKAPELLIY GGSSLHSGVP | 60 |
| SRFSGSGSGT DFSLTISNLQ PEDIAVYYCQ QSFSSPWTFG QGTKVEIK | 108 |
| M9-D08 HC | |
| EVQLLESGGG LVQPGGSLRL SCAASGFTFS WYKMMWVRQA PGKGLEWVSS IYPSGGWTNY | 60 |
| ADSVKGRFTI SRDNSKNTLY LQMNSLRAED TAVYYCTRGS PWGDDAFDIW GQGTMVTVSS | 120 |
| ASTKGPSVFP LAPSSKS | 137 |
| M9-E04 LC | |
| QDIQMIQSPS SLSASVGDRV TITCRASQSI SGYLNWYQQR SGKAPKLLIF AASNLQTGVP | 60 |
| SRFSGSGSGT DFTLTINNLQ PEDFATYYCQ QSHTPPKTFG PGTKVDIK | 108 |
| M9-E04 HC | |
| EVQLLESGGG LVQPGGSLRL SCAASGFTFS EYDMMWVRQA PGKGLEWVSS IGSSGGMTYY | 60 |
| ADSVKGRFTI SRDNSKNTLY LQMNSLRAED TAVYYCARDQ VAAAAIDYWG QGTLVTVSSA | 120 |
| STKGPSVFPL APSSKS | 136 |
| M9-F08 LC | |
| QDIQMTqSPS SLSASVGDRV TITCRASQSI SSYLNWYQQK PGKAPKLLIY AASSLQSGVP | 60 |
| SRFSGSGSGT DFTLTISSLQ PEDFATYYCQ QSYSTPPYTF GQGTKLEIK | 109 |
| M9-F08 HC | |
| EVQLLESGGG LVQPGGSLRL SCAASGFTFS PYAMTWVRQA PGKGLEWVSV IYPSGGFTDY | 60 |
| ADSVKGRFTI SRDNSKNTLY LQMNSLRAED TAMYYCARAS GSYLDAFDIW GQGTMVTVSS | 120 |
| ASTKGPSVFP LAPSSKS | 137 |
| M9-F09 LC | |
| QDIQMTQSPS SLSASVGDRV TITCRASQSI SSYLNWYQQK PGKAPKLLIY AASSLQSGVP | 60 |
| SKFSGSGSGT DYTLTISSLQ PEDFATYYCQ QTYTTPWTFG QGTKVEIK | 108 |
| M9-F09 HC | |
| EVQLLESGGG LVQPGGSLRL SCAASGFTFS SYPMGWVRQA PGKGLEWVSR ISSSGGMTIY | 60 |
| ADSVKGRFTI SRDNSKNTLY LQMNSLRAED TAVYYCARDD WNVGMDVWGQ GTTVTVSSAS | 120 |
| TKGPSVFPLA PSSKS | 135 |
| M9-F10 LC | |
| QDIQMTQSPS SLSASVGDRV TITCRASQSI NTYLNWYQQK PGKAPKVLIH AASTLESGVP | 60 |
| SRFSGSGSGT DFTLTISSLQ PEDFATYYCQ QSYSTPYTFG QGTKLEVR | 108 |
| M9-F10 HC | |
| EVQLLESGGG LVQPGGSLRL SCAASGFTFS DYDMEWVRQA PGKGLEWVSS ISPSGGSTIY | 60 |
| ADSVKGRFTI SRDNSKNTLY LQMNSLRAED TAVYYCARQG LLTAFDIWGQ GTMVTVSSAS | 120 |
| TKGPSVFPLA PSSKS | 135 |
| M9-G08 LC | |
| QDIQMTQSPS SLSASVGDRV TITCRASQSI SSYLNWYQQK PGKAPKLLIY AASSLQSGVP | 60 |
| SRFSGSGSGT DFTLTISSLQ PEDFATYYCQ QSYSTPITFG GGTKVEIK | 108 |
| M9-G08 HC | |
| EVQLLESGGG LVQPGGSLRL SCAASGFTFS YYTMLWVRQA PGKGLEWVSS IYPSGGFTMY | 60 |
| ADSVKGRFTI SRDNSKNTLY LQMNSLRAED TAVYYCARVD TAMAMIDYWG QGTLVTVSSA | 120 |
| STKGPSVFPL APSSKS | 136 |
| M9-H02 LC | |
| QDIQMTQSPS SLSASVGDRV IITCRASRSI ATYLNWYQQK PGKAPNLLIF GASTLQSGVP | 60 |
| SRFSGSGSGT DFTLTISDLQ PEDFATYYCQ QSFSDPYTFG QGTNLEMK | 108 |
| M9-H02 HC | |
| EVQLLESGGG LVQPGGSLRL SCAASGFTFS AYMMIWVRQA PGKGLEWVSV IYPSGGVTMY | 60 |
| ADSVKGRFTI SRDNSKNTLY LQMNSLRAED TAVYYCARGT VGASDAFDIW GQGTMVTVSS | 120 |
| ASTKGPSVFP LAPSSKS | 137 |
| M9-H03 LC | |
| QYELTQAPSV SVAPGQTASI TCSGDKLGNR YTSWYQQKPG QSPVLVIFQD NKRPSGIPER | 60 |
| FSGSNSGNTA TLTISGTQAM DEADYYCQAL DSNTYVFGTG TKVTVL | 106 |
| M9-H03 HC | |
| EVQLLESGGG LVQPGGSLRL SCAASGFTFS WYSMGWVRQA PGKGLEWVSY IVPSGGYTMY | 60 |
| ADSVKGRFTI SRDNSKNTLY LQMNSLRAED TAVYYCARDP GVSYYYYGMD VWGQGTTVTV | 120 |
| SSASTKGPSV FPLAPSSKS | 139 |
| M9-H04 LC | |
| QDIQMTQSPS SLSASVGDRV TITCRASQSI SSYLNWYQQK PGKAPKLLIY AASSLQSGVP | 60 |
| SRFSGSGSGT DFTLTISSLQ PEDFATYYCQ QSYSTPPTFG QGTRLEIK | 108 |
| M9-H04 HC | |
| EVQLLESGGG LVQPGGSLRL SCAASGFTFS AYTMWWVRQA PGKGLEWVSS IWPSGGSTFY | 60 |
| ADSVKGRFTI SRDNSKNTLY LQMNSLRAED TAVYYCARTY DSSAGEVDYW GQGTLVTVSS | 120 |
| ASTKGPSVFP LAPSSKS | 137 |
| M10-A03 LC | |
| QDIQMTQSPS SLSASVGDRV TITCRASQRI SFYLNWFQQK PGKAPNLLIY GASSLQSGVP | 60 |
| SRFSGSGSGT DFTLTISSLQ PKDFGTYYCQ QTFSTPNTFG QGTKLEIK | 108 |
| M10-A03 HC | |
| EVQLLESGGG LVQPGGSLRL SCAASGFTFS PYPMQWVRQA PGKGLEWVSS ISSSGGMTEY | 60 |
| ADSVKGRFTI SRDNSKNTLY LQMNSLRAED TAVYYCARDD YGGKGGAFDI WGQGTMVTVS | 120 |
| SASTKGPSVF PLAPSSKS | 138 |
| M10-A12 LC | |
| QDIQMTQSPL SLSAFVGDRV TITCRASRDI SVYLNWYQLK SGKAPKLLIY GASSLQSGVP | 60 |
| SRFSGSGSGT DFTLTITSLQ PEDFATYYCQ QSYSIPFTFG GGTKVETK | 108 |
| M10-A12 HC | |
| EVQLLESGGG LVQPGGSLRL SCAASGFTFS LYLMHWVRQA PGKGLEWVSS IYSSGGFTTY | 60 |
| ADSVKGRFTI SRDNSKNTLY LQMNSLRAED TAVYYCARDT DYGMDVWGQG TTVTVSSAST | 120 |
| KGPSVFPLAP SSKS | 134 |
| M10-B09 LC | |
| QDIQMTQSPS SLSASVGDGV TITCRASQSI STYLNWYQQR PGKAPKLLIY GASSLQSGVP | 60 |
| SRFSGSGSGT DFTLTISSLQ REDFATYYCQ QSFSTPWTFG QGTRVEIK | 108 |
| M10-B09 HC | |
| EVQLLESGGG LVQPGGSLRL SCAASGFTFS WYEMSWVRQA PGKGLEWVSR IWPSGGVTMY | 60 |
| ADSVKGRFTI SRDNSKNTLY LqMNSLRAED TAVYYCTRTS ITTVGMDVWG QGTTVTVSSA | 120 |
| STKGPSVFPL APSSKS | 136 |
| M10-C11 LC | |
| QDIQMTQSPS SLSASVGDRV TITCRASQSI SIYLNWYQQK PEKAPKLLIF AASTLQSGVP | 60 |
| SRFSGSGSGT DFTLTISNLQ PEDFATYYCQ QSHSIPPTFG LGTKVEVK | 108 |
| M10-C11 HC | |
| EVQLLESGGG LVQPGGSLRL SCAASGFTFS MYPMMWVRQA PGKGLEWVSY ISPSGGMTDY | 60 |
| ADSVKGRFTI SRDNSKNTLY LQMNSLRAED MAVYYCARVA GSSDAFDIWG QGTMVTVSSA | 120 |
| STKGPSVFPL APSSKS | 136 |
| M10-D11 LC | |
| QDIQMTQSPL SLPVTPGEPA SISCRSSQSL LHSNGYNYLD WYLQKPGQSP QLLIYLGSNR | 60 |
| ASGVPDRFSG SGSGTDFTLK ISRVEAEDVG VYYCMQALQT PLTFGPGTKV HIK | 113 |
| M10-D11 HC | |
| EVQLLESGGG LVQPGGSLRL SCAASGFTFS AYPMNWVRQA PGKGLEWVSR ISSSGGNTSY | 60 |
| ADSVKGRFTI SRDNSKNTLY LQMNSLRAED TAVYYCALGY LGYWGQGTLV TVSSASTKGP | 120 |
| SVFPLAPSSK S | 131 |
| M10-E06 LC | |
| QDIQMTQSPS SLSASVGDRV TITCRASQSI STYLNWYQQK PGKAPKLLIY GASSLQSGVP | 60 |
| SRFSGSGSGT DFTLTISSLQ PEDFTIYYCQ QSYSDPYTFG QGTKLDIK | 108 |
| M10-E06 HC | |
| EVQLLESGGG LVQPGGSLRL SCAASGFTFS LYRMFWVRQA PGKGLEWVSS IWSSGGPTMY | 60 |
| ADSVKGRFTI SRDNSKNTLY LQMNSLRAED TAVYYCAREY PSTYYFDYWG QGTLVTVSSA | 120 |
| STKGPSVFPL APSSKS | 136 |
| M10-F09 LC | |
| QDIQMTQSPS SLSASVGDRV TITCRASQTI DDDLIWYQQK PGRAPKLLIY AASSLQSGVP | 60 |
| SRFSGSGSGT DFTLTITSLQ PEDFATYYCQ QSYNIPRTFG QGTKLESK | 108 |
| M10-F09 HC | |
| EVQLLESGGG LVQPGGSLRL SCAASGFTFS NYDMMWVRQA PGKGLEWVSY ISPSGGFTRY | 60 |
| ADSVKGRFTI SRDNSKNTLY LQMNSLRAED TATYYCAKDI YYYNWGPSHY FDSWGQGTLV | 120 |
| TVSSASTKGP SVFPLAPSSK S | 141 |
| M10-G09 LC | |
| QDIQMTQSPS SLSASVGDSV TITCRASQSI SGYINWYQQK AGKAPKLLIY AASSLQSGVP | 60 |
| SRFSGSGSGT HFTLTISSLQ PEDFATYYCQ QYVSYPFTFG PGTKVDIK | 108 |
| M10-G09 HC | |
| EVQLLESGGG LVQPGGSLRL SCAASGFTFS QYGMQWVRQA PGKGLEWVSS IRSSGGATRY | 60 |
| ADSVKGRFTI SRDNSKNTLY LQMNSLRAED TAVYYCARDG YYDSSGYPDY WGQGTLVTVS | 120 |
| SASTKGPSVF PLAPSSKS | 138 |
| M11-A10 LC | |
| QDIQMTQSPS SLSASVGDRV AITCRASQSI DTYLNWYQQK PGKAPKLLIY DASNLEIGVP | 60 |
| SRFSGSGSGT DFTFIINSLQ PEDVATYYCQ HYLYAPYSFG QGTKLEIK | 108 |
| M11-A10 HC | |
| EVQLLESGGG LVQPGGSLRL SCAASGFTFS NYWMMWVRQA PGKGLEWVSG IGSSGGFTSY | 60 |
| ADSVKGRFTI SRDNSKNTLY LQMNSLRAED TAVYYCAKGS YSDYGVFESW GQGTLVTVSS | 120 |
| ASTKGPSVFP LAPSSKS | 137 |
| M11-E01 LC | |
| QDIQMTQSPS SLSASVGDRV TITCRASQSI SSYLNWYQQK PGKAPKLLIY AASSLQSGVP | 60 |
| SRFSGSGSGT DFTLTISSLQ PEDFATYYCQ QSYSTPPTFG QGTKVEIK | 108 |
| M11-E01 HC | |
| EVQLLESGGG LVQPGGSLRL SCAASGFTFS TYEMYWVRQA PGKGLEWVSG IGSSGGMTMY | 60 |
| ADSVKGRFTI SRDNSKNTLY LQMNSLRAED TAMYYCAREQ PGIAALQFWG QGTLVTVSSA | 120 |
| STKGPSVFPL APSSKS | 136 |
| M11-E04 LC | |
| QDIQMTQSPS SLSASVGDRV TITCRASQSI SIYLTWYQHR PGKAPNLLIY GAATLQTGVP | 60 |
| SRFSGSGSGT DFTLTIRGLQ PEDFATYYCQ QTFSLPRTFG QGTKLEIK | 108 |
| M11-E04 HC | |
| EVQLLESGGG LVQPGGSLRL SCAASGFTFS MYHMNWVRQA PGKGLEWVSG IVSSGGVTFY | 60 |
| ADSVKGRFTI SRDNSKNTLY LQMNSLRAED TAVYYCARIT TVTTGGAFDI WGQGTMVTVS | 120 |
| SASTKGPSVF PLAPSSKS | 138 |
| M11-E05 LC | |
| QDIQMTQSPS SLSASVGDTV TITCRTSQTI NNYLNWYQQR PGEAPKVLIY ATHTLESGVP | 60 |
| SRFSGSGSGT DFTLTIGSLQ PEDFATYYCQ QSFAFPYTFG QGTKVEIT | 108 |
| M11-E05 HC | |
| EVQLLESGGG LVQPGGSLRL SCAASGFTFS WYTMGWVRQA PGKGLEWVSW IYFGGLTTYA | 60 |
| DSVKGRFTIS RDNSKNTLYL QMNSLRAEDT AVYYCARLGG PLDAFDIWGQ GTMVTVSSAS | 120 |
| TKGPSVFPLA PSSKS | 135 |
| M11-E06 LC | |
| QDIQMTQSPS SLSASIGDRV TISCRASRGI GTYLNWYQQH AGKAPKLLIR AASSLETGVP | 60 |
| PRFSGSGSGT DFTLTISSLQ SDDFATYYCQ ESFTNVYNFG QGTKLEIK | 108 |
| M11-E06 HC | |
| EVQLLESGGG LVQPGGSLRL SCAASGFTFS QYAMHWVRQA PGKGLEWVSS IYPSGGFTLY | 60 |
| ADSVKGRFTI SRDNSKNTLY LQMNSLRAED TAMYYCARGG WLAGGELLNW GQGTLVTVSS | 120 |
| ASTKGPSVFP LAPSSKS | 137 |
| M11-G09 LC | |
| QDIQMTQSPS SLSASVGDRV TITCRTSQGI NHYLNWYQQK PGKAPKILVF AASELQTGVP | 60 |
| SRFSGTGSGT SYTLTITSLQ PEDVATYYCQ QTYTSPYTFG QGTKLEVK | 108 |
| M11-G09 HC | |
| EVQLLESGGG LVQPGGSLRL SCAASGFTFS LYNMTWVRQA PGKGLEWVSY IYPSGGGTHY | 60 |
| ADSVKGRFTI SRDNSKNTLY LQMNSLRAED TAVYYCARDT GFWSADAFDI WGQGTMVTVS | 120 |
| SASTKGPSVF PLAPSSKS | 138 |
| M11-G12 LC | |
| QDIQMTQSPS SLSAFVGDRV SITCRASQTI SVYVNWYQHK SGQAPKLLIY GASSLQSGVP | 60 |
| SRFSGSGSGT DFTLTISSLQ PEDFATYFCQ QSYSIPFTFG GGTDVQIR | 108 |
| M11-G12 HC | |
| EVQLLESGGG LVQPGGSLRL SCAASGFTFS QYPMNWVRQA PGKGLEWVSS ISSSGGFTTY | 60 |
| ADSVKGRFTI SRDNSKNTLY LQMNSLRAED TAVYYCAREE QQGGFDYWGQ GTLVTVSSAS | 120 |
| TKGPSVFPLA PSSKS | 135 |
| M12-A08 LC | |
| QDIQMTQSPS SLSASVGDRV TITCRASQSI SRYLNWYQQK PGKAPKLLIY AASTLETGVP | 60 |
| SRFSGSGSGT DFTLTITTLQ PEDFVIYYCQ QSYSTPYTFG QGTKLEIK | 108 |
| M12-A08 HC | |
| EVQLLESGGG LVQPGGSLRL SCAASGFTFS WYYMGWVRQA PGKGLEWVSW IVSSGGLTLY | 60 |
| ADSVKGRFTI SRDNSKNTLY LQMNSLRAED TAMYYCARTT VTTGDAFDIW GQGTMVTVSS | 120 |
| ASTKGPSVFP LAPSSKS | 137 |
| M12-B04 LC | |
| QDIQMTQSPS SLSASVGDRV TITCRASQGI RNDLGWYQHK PGKAPKLLIY AASILQSGVP | 60 |
| SRFSGTASGT DFTLTISSLQ PEDFATYFCL QDYEYPLTFG GGTKLDIK | 108 |
| M12-B04 HC | |
| EVQLLESGGG LVQPGGSLRL SCAASGFTFS LYSMYWVRQA PGKGLEWVSR IRPSGGGTVY | 60 |
| ADSVKGRFTI SRDNSKNTLY LQMNSLRAED TAVYYCARDP LYSSGDVWGQ GTTVTVSSAS | 120 |
| TKGPSVFPLA PSSKS | 135 |
| M12-C09 LC | |
| QDIQMTQSPS SLSASVGDRV TITCRASQSI GIYLNWYHQK PGKAPNLLIY GASSLQSGVP | 60 |
| SRFSGSGSGT DFTLTISSLQ PGDFATYYCQ HSYSTPFTFG GGTKVEIK | 108 |
| M12-C09 HC | |
| EVQLLESGGG LVQPGGSLRL SCAASGFTFS SYAMVWVRQA PGKGLEWVSS IGSSGGFTLY | 60 |
| ADSVKGRFTI SRDNSKNTLY LQMNSLRAED TAVYYCASMN LGGGDAFDIW GQGTMVTVSS | 120 |
| ASTKGPSVFP LAPSSKS | 137 |
| M12-C10 LC | |
| QSALTQPPSV SVSPGQTASI TCSGDKLGEK YVSWYQQKPG QSPVVVIYQD NKRPSGIPER | 60 |
| FSGSNSGNTA TLTISGTQAV DEADYYCQAW DSYTVVFGGG SKLTVLGQPK | 110 |
| M12-C10 HC | |
| EVQLLESGGG LVQPGGSLRL SCAASGFTFS DYEMHWVRQA PGKGLEWVSG ISPSGGKTQY | 60 |
| ADSVKGRFTI SRDNSKNTLY LQMNSLRAED TAVYYCARDL KWGGRGSPDW YFDLWGRGTL | 120 |
| VTVSSASTKG PSVFPLAPSS KS | 142 |
| M12-D10 LC | |
| QDIQMTQSPS SLSASVGDRV TITCRASQSI SSYLNWYQQK PGKAPKLLIY AASSLQSGVP | 60 |
| SRFSGSGSGT DFTLTISSLQ PEDFATYYCQ QSYSTPPTFG GGTKVEIK | 108 |
| M12-D10 HC | |
| EVQLLESGGG LVQPGGSLRL SCAASGFTFS NYPMDWVRQA PGKGLEWVSS ISSSGGWTNY | 60 |
| ADSVKGRFTI SRDNSKNTLY LQMNSLRAED TAVYYCATDT SGSYLGFDYW GQGTLVTVSS | 120 |
| ASTKGPSVFP LAPSSKS | 137 |
| M12-E06 LC | |
| QDIQMTQSPS SLSASVGDRV SITCRASQSI STYLNWYQHK PGKAPTLLIY GAFSLQSGVP | 60 |
| SRFSGSGSGT DFALTISSLQ PEDFATYYCQ QSHSTPPTFG QGTRVEIK | 108 |
| M12-E06 HC | |
| EVQLLESGGG LVQPGGSLRL SCAASGFTFS QYKMLWVRQA PGKGLEWVSG IGPSGGLTAY | 60 |
| ADSVKGRFTI SRDNSKNTLY LQMNSLRAED TAVYYCARAP WFGELGMDVW GQGTTVTVSS | 120 |
| ASTKGPSVFP LAPSSKS | 137 |
| M27-A10 LC | |
| QDIQMTQSPS SLSASVGDRV TITCRASQSI SAYLNWYQQK PGKAPQLLMY GVGSLQSGVP | 60 |
| SRFSGSGSGT DFTLTISSLQ PEDFATYFCQ QGYTTPVTFG GGTKVEIK | 108 |
| M27-A10 HC | |
| EVQLLESGGG LVQPGGSLRL SCAASGFTFS WYRMDWVRQA PGKGLEWVSS IWPSGGLTSY | 60 |
| ADSVKGRFTI SRDNSKNTLY LQMNSLRAED TAVYYCARGW APGGDAFDIW GQGTMVTVSS | 120 |
| ASTKGPSVFP LAPSSKS | 137 |
| M27-B01 LC | |
| QDIQMTQSPS SLSASVGDRV TITCRASQSI SSYLNWYQQK PGKAPKLLIY AASSLQSGVP | 60 |
| SRFSGSGSGT DFTLTISSLQ PEDFATYYCQ QSYSTPYTFG QGTKLEIK | 108 |
| M27-B01 HC | |
| EVQLLESGGG LVQPGGSLRL SCAASGFTFS DYTMWWVRQA PGKGLEWVSS ISSSGGITFY | 60 |
| ADSVKGRFTI SRDNSKNTLY LQMNSLRAED TAVYYCARSA DTAMGGAFDI WGQGTMVTVS | 120 |
| SASTKGPSVF PLAPSSKS | 138 |
| M27-B12 LC | |
| QYELTQPPAV SVSPGQTATI TCSGDKLGDE YAAWYQQKPG QSPVLVIYQD RKRPSGIPER | 60 |
| FSGSNFGNTA TLTITGTQVM DEADYYCQAW GKRNVVFGGG TKLTVL | 106 |
| M27-B12 HC | |
| EVQLLESGGG LVQPGGSLRL SCAASGFTFS WYQMMWVRQA PGKGLEWVSS ISPSGGITEY | 60 |
| ADSVKGRFTI SRDNSKNTLY LQMNSLRAED TAVYYCARDR SSGWYYYGMD VWGQGTTVTV | 120 |
| SSASTKGPSV FPLAPSSKS | 139 |
| M27-E03 LC | |
| QDIQMTQSPS SLSASVGDRV TITCRASQSI SSYLNWYQQK PGKAPKLLIY AASSLQSGVP | 60 |
| SRFSGSGSGT DFTLTISSLQ PEDFATYYCQ QSYSTPRTFG QGTKVEIK | 108 |
| M27-E03 HC | |
| EVQLLESGGG LVQPGGSLRL SCAASGFTFS SYMMHWVRQA PGKGLEWVSG IYPSGGWTDY | 60 |
| ADSVKGRFTI SRDNSKNTLY LQMNSLRAED TATYYCARLV AGLDAFDIWG QGTMVTVSSA | 120 |
| STKGPSVFPL APSSKS | 136 |
| M27-F04 LC | |
| QDIQMTQSPS SLSASVGDRV TITCRASQSI SSYLNWYQQK PGKAPKLLIY AASSLQSGVP | 60 |
| SRFSGSGSGT DFTLTISSLQ PEDFATYYCQ QSYSTPPTFG QGTKVEIK | 108 |
| M27-F04 HC | |
| EVQLLESGGG LVQPGGSLRL SCAASGFTFS WYPMTWVRQA PGKGLEWVSS IGPSGGQTIY | 60 |
| ADSVKGRFTI SRDNSKNTLY LQMNSLRAED TAVYYCTTEY GDYGGGFDPW GQGTLVTVSS | 120 |
| ASTKGPSVFP LAPSSKS | 137 |
| M27-F11 LC | |
| QDIQMTQSPS FLSASVGDRV TITCRASQGI SSYLAWYQQK PGKAPKLLIY AASSLQSGVP | 60 |
| SRFSGSGSGT DFTLTISSLQ PEDFATYYCQ QSYNTLRTFG PGTKVDLK | 108 |
| M27-F11 HC | |
| EVQLLESGGG LVQPGGSLRL SCAASGFTFS SYHMMWVRQA PGKGLEWVSS IYPSGGATMY | 60 |
| ADSVKGRFTI SRDNSKNTLY LQMNSLRAED TAMYYCARDG YHYGDYTYFQ HWGQGTLVTV | 120 |
| SSASTKGPSV FPLAPSSKS | 139 |
| M27-G01 LC | |
| QDIQMTQSPS SLSASVGDRV TITCRASQSI STYLNWYQQK PGKAPKLLIY GASSLQSGVP | 60 |
| SRFSGSGSGT DFTLTISSLQ PEDFTIYYCQ QSYSDPYTFG QGTKLDIK | 108 |
| M27-G01 HC | |
| EVQLLESGGG LVQPGGSLRL SCAASGFTFS LYRMFWVRQA PGKGLEWVSS IWSSGGPTMY | 60 |
| ADSVKGRFTI SRDNSKNTLY LQMNSLRAED TAVYYCAREY PSTYYFDYWG QGTLVTVSSA | 120 |
| STKGPSVFPL APSSKS | 136 |
| M27-G04 LC | |
| QDIQMTQSPS SLSASVGDRV TITCRASQRI SYYLTWYQQK PGKVPKLLIY AASSLESGVP | 60 |
| SRFSGSGSGT DFTLTISNLQ PEDFATYYCQ QAFSTPFTFG GGTKVEIK | 108 |
| M27-G04 HC | |
| EVQLLESGGG LVQPGGSLRL SCAASGFTFS AYYMVWVRQA PGKGLEWVSY ISPSGGQTQY | 60 |
| ADSVKGRFTI SRDNSKNTLY LQMNSLRAED TAVYYCAREA ISSSSFDYWG QGTLVTVSSA | 120 |
| STKGPSVFPL APSSKS | 136 |
| M27-G09 LC | |
| QDIQMTQSPS SVSASVGDRI TITCRTRQSI SNYLNWYQQK PGEPPKLLIF AASSLQSGVP | 60 |
| SRFSGSGTGT EFTLTISSLQ PEDLAIYYCQ QSYDIPFTFG QGTKLEIK | 108 |
| M27-G09 HC | |
| EVQLLESGGG LVQPGGSLRL SCAASGFTFS EYDMAWVRQA PGKGLEWVSY IVSSGGFTSY | 60 |
| ADSVKGRFTI SRDNSKNTLY LQMNSLRAED TAVYYCTTWA GWIAAADYWG QGTLVTVSSA | 120 |
| STKGPSVFPL APSSKS | 136 |
| M27-H10 LC | |
| QDIQMTQSPS SLSASVGDRV TITCRASQSI SNYLNWYQQK PGKAPKFLIY AASSLQSGVP | 60 |
| SRFSGSGSGT DFTLSISSLQ PEDFATYYCQ QSYSTPQTFG QGTKVEMK | 108 |
| M27-H10 HC | |
| EVQLLESGGG LVQPGGSLRL SCAASGFTFS AYQMAWVRQA PGKGLEWVSV IYSSGGYTDY | 60 |
| ADSVKGRFTI SRDNSKNTLY LQMNSLRAED TAVYYCARHN WNDGAFDIWG QGTMVTVSSA | 120 |
| STKGPSVFPL APSSKS | 136 |
| M28-A01 LC | |
| QDIQMTQSPS SLSASVGDRV TITCRASQSI SSYLNWYQQK PGKAPKLLIY AASSLQSGVP | 60 |
| SRFSGSGSGT DFTLTISSLQ PEDFATYYCQ QSYSTLTFGG GTKVEIK | 107 |
| M28-A01 HC | |
| EVQLLESGGG LVQPGGSLRL SCAASGFTFS WYAMHWVRQA PGKGLEWVSG IYSSGGYTKY | 60 |
| ADSVKGRFTI SRDNSKNTLY LQMNSLRAED TAVYYCARDL SNGDDVFDIW GQGTMVTVSS | 120 |
| ASTKGPSVFP LAPSSKS | 137 |
| M28-C03 LC | |
| QDIQMTQSPS SLSASVGDRV TITCRASQSI NFYLNWYQQK PGKAPKLLIY VASSLESGVP | 60 |
| SRFSGSASGT EFTLTISSLQ PEDFATYYCL QSYSAPYTFG QGTKVEIT | 108 |
| M28-C03 HC | |
| EVQLLESGGG LVQPGGSLRL SCAASGFTFS YYQMGWVRQA PGKGLEWVSS IYPSGGMTDY | 60 |
| ADSVKGRFTI SRDNSKNTLY LQMNSLRAED TAVYYCTRGS PWGDDAFDIW GQGTMVTVSS | 120 |
| ASTKGPSVFP LAPSSKS | 137 |
| M28-D02 LC | |
| QDIqMTQSPS SLSASEGDMV TITCRTSRRI GTYLNWYQQK PGKAPKLLIY GASSLQSGVP | 60 |
| SRFSGSGSGT DFTLTVSSLQ PEDVGTYYCQ QSFSSPWTFG PGTKVEIK | 108 |
| M28-D02 HC | |
| EVQLLESGGG LVQPGGSLRL SCAASGFTFS WYPMQWVRQA PGKGLEWVSY IYPSGGGTDY | 60 |
| ADSVKGRFTI SRDNSKNTLY LQMNSLRAED TATYYCATSS GWLGDAFDIW GQGTMVTVSS | 120 |
| ASTKGPSVFP LAPSSKS | 137 |
| M28-D12 LC | |
| QDIQMTQSPS SLSASVGDRV TITCRASQSI ATYLNWYQQK PGRAPKLLIY AASSLQSGVP | 60 |
| SRFVGGGSGS GTHFTLTISS LQPEDFATYY CQQSYSTRET FGQGTKVEIK | 110 |
| M28-D12 HC | |
| EVQLLESGGG LVQPGGSLRL SCAASGFTFS WYTMHWVRQA PGKGLEWVSV IYPSGGPTSY | 60 |
| ADSVKGRFTI SRDNSKNTLY LQMNSLRAED TATYYCARDG SGSYLGFDYW GQGTLVTVSS | 120 |
| ASTKGPSVFP LAPSSKS | 137 |
| M28-E01 LC | |
| QDIQMTQSPS SLSASVGDRV TITCRASQSI SSYLNWYQQK PGKAPKLLIY AASSLQSGVP | 60 |
| SKFSGSGSGT DYTLTISSLQ PEDFATYYCQ QTYTTPWTFG QGTKVEIK | 108 |
| M28-E01 HC | |
| EVQLLESGGG LVQPGGSLRL SCAASGFTFS SYPMGWVRQA PGKGLEWVSR ISSSGGMTIY | 60 |
| ADSVKGRFTI SRDNSKNTLY LQMNSLRAED TAVYYCARDD WNVGMDVWGQ GTTVTVSSAS | 120 |
| TKGPSVFPLA PSSKS | 135 |
| M28-E11 LC | |
| QDIQMTQSPS SVSASVGDRV TINCRASQDI SNWLAWYQQK PGKAPNLLIY AASSLQTGAP | 60 |
| SRFSGSGSGT DFTLTISSLQ PEDFGTYVCQ QSYSLPWTFG LGTKVEVR | 108 |
| M28-E11 HC | |
| EVQLLESGGG LVQPGGSLRL SCAASGFTFS LYDMTWVRQA PGKGLEWVSG ISSSGGVTIY | 60 |
| ADSVKGRFTI SRDNSKNTLY LQMNSLRAED TAVYYCARTY YYDSSGYADA FDIWGQGTMV | 120 |
| TVSSASTKGP SVFPLAPSSK S | 141 |
| M28-F01 LC | |
| QDIQMTQSPS SLSASVGDRV TITCRASQSI NTYLNWYQQK PGKAPKVLIH AASTLESGVP | 60 |
| SRFSGSGSGT DFTLTISSLQ PEDFATYYCQ QSYSTPPTFG QGTKVEIK | 108 |
| M28-F01 HC | |
| EVQLLESGGG LVQPGGSLRL SCAASGFTFS VYLMHWVRQA PGKGLEWVSG ISPSGGYTQY | 60 |
| ADSVKGRFTI SRDNSKNTLY LQMNSLRAED TAVYYCARPG GLDAFDIWGQ GTMVTVSSAS | 120 |
| TKGPSVFPLA PSSKS | 135 |
| M28-F05 LC | |
| QDIQMTQSPS SLSASVGDRV TITCRASQSI SSYLNWYQQK PGKAPKLLIY AASSLQSGVP | 60 |
| SRFSGSGSGT DFTLTISSLQ PEDFATYYCQ QSYSTPLTFG GGTKVEIK | 108 |
| M28-F05 HC | |
| EVQLLESGGG LVQPGGSLRL SCAASGFTFS RYIMWWVRQA PGKGLEWVSG IYSSGGYTQY | 60 |
| ADSVKGRFTI SRDNSKNTLY LQMNSLRAED TAMYYCAREL EGLGGFDYWG QGTLVTVSSA | 120 |
| STKGPSVFPL APSSKS | 136 |
| M28-F07 LC | |
| QDIQMTQSPS SVSASVGDRV TITCRASQGI SSWLAWYQQK PGKAPKLLIY ATSGLQSGVP | 60 |
| SRFSGSGSGT DFTLTISSLQ PEDFATYYCQ QAKSFPLTFG GGTRVEIK | 108 |
| M28-F07 HC | |
| EVQLLESGGG LVQPGGSLRL SCAASGFTFS DYTMYWVRQA PGKGLEWVSS IVPSGGHTLY | 60 |
| ADSVKGRFTI SRDNSKNTLY LQMNSLRAED TAVYYCAKDH LSSWYGGFFD YWGQGTLVTV | 120 |
| SSASTKGPSV FPLAPSSKS | 139 |
| M29-C07 LC | |
| QDIQMTQSPS SLSASVGDRV TITCRASQSI SSYLNWYQQK PGKAPKLLIY AASSLQSGVP | 60 |
| SRFSGSGSGT DFTLTISSLQ PEDFATYYCQ QSYSTRYTFG QGTKLEIK | 108 |
| M29-C07 HC | |
| EVQLLESGGG LVQPGGSLRL SCAASGFTFS GYDMMWVRQA PGKGLEWVSV ISSSGGNTAY | 60 |
| ADSVKGRFTI SRDNSKNTLY LQMNSLRAED TAVYYCARES SGLYYFDYWG QGTLVTVSSA | 120 |
| STKGPSVFPL APSSKS | 136 |
| M29-D10 LC | |
| QDIQMTQSPS SLSASVGDTV SITCRASQSI TIYLNWYQHK PGKAPNLLIY GASNLHSGVP | 60 |
| SRFSGSGSGT DFTLTISSLQ PEDFATYYCQ QSYDTPLTFG GGTKVEIK | 108 |
| M29-D10 HC | |
| EVQLLESGGG LVQPGGSLRL SCAASGFTFS WYPMYWVRQA PGKGLEWVSS IGSSGGPTPY | 60 |
| ADSVKGRFTI SRDNSKNTLY LQMNSLRAED TAVYYCARWA DYGGSLDYWG QGTLVTVSSA | 120 |
| STKGPSVFPL APSSKS | 136 |
| M29-E02 LC | |
| QSVLTQPPSV SEAPRQRVTI SCSGSSSNIG NNAVSWYQQL PGKAPKLLIY YDDLLPSGVS | 60 |
| DRFSGSKSGT SASLAISGLR SEDEADYYCA AWDDSLNGFV FGTGTKVTVL | 110 |
| M29-E02 HC | |
| EVQLLESGGG LVQPGGSLRL SCAASGFTFS RYPMMWVRQA PGKGLEWVSV IYPSGGDTFY | 60 |
| ADSVKGRFTI SRDNSKNTLY LQMNSLRAED TAVYYCASGD DYLWEAAVYW GQGTLVTVSS | 120 |
| ASTKGPSVFP LAPSSKS | 137 |
| M29-G08 LC | |
| QDIQMTQSPA TLSASPGETV TLSCRASQNI GNDVAWYRQR PGQAPRLLIH HASTRAYGIP | 60 |
| ARLRGSGSAT EFTLTITSLE PEDFAIYYCQ QFYDWPAHTF ALGTRLEIKR | 110 |
| M29-G08 HC | |
| EVQLLESGGG LVQPGGSLRL SCAASGFTFS YYHMWWVRQA PGKGLEWVSG ISPSGGFTFY | 60 |
| ADSVKGRFTI SRDNSKNTLY LQMNSLRAED TAVYYCARDY YYDSSGYSPL GYWGQGTLVT | 120 |
| VSSASTKGPS VFPLAPSSKS | 140 |
| M29-G10 LC | |
| QDIQMTQSPS SLSSSVGDSA TITCRASQSI SIYLNWYQQK PGKAPKILIY GASQLESGVP | 60 |
| SRFSGSGSGT DFTLTVSGLQ PEDFATYWCQ QSYNVPYTFG QGTKLEIK | 108 |
| M29-G10 HC | |
| EVQLLESGGG LVQPGGSLRL SCAASGFTFS FYKMIWVRQA PGKGLEWVSS ISSSGGSTQY | 60 |
| ADSVKGRFTI SRDNSKNTLY LQMNSLRAED TAVYYCARDR VDLGYLDYWG QGTLVTVSSA | 120 |
| STKGPSVFPL APSSKS | 136 |
| M74-A07 LC | |
| QDIQMTQSPS SLSASVRDRV TITCRTSQNI NTYLNWYYQA PGRAPKLLIF GVSSLHRGVS | 60 |
| SRFSGSGDGT EFTLTISSLQ PEDIGTYFCQ QSYSSPWTFG QGTKVEIK | 108 |
| M74-A07 HC | |
| EVQLLESGGG LVQPGGSLRL SCAASGFTFS QYLMMWVRQA PGKGLEWVSS IYPSGGYTSY | 60 |
| ADSVKGRFTI SRDNSKNTLY LQMNSLRAED TAVYYCARVS TAVADNDYWG QGTLVTVSSA | 120 |
| STKGPSVFPL APSSKS | 136 |
| M76-F02 LC | |
| QDIQMTQSPS SLSASVGDRV TITCRASQTI DNYLHWYQQK PGKAPKVLIH DASSLQSGVP | 60 |
| PRFSGSGSGT DFTLTISSLQ PEDFATYYCQ QSYDTPQYTF GQGTKLEIK | 109 |
| M76-F02 HC | |
| EVQLLESGGG LVQPGGSLRL SCAASGFTFS LYDMNWVRQA PGKGLEWVSG ISPSGGQTMY | 60 |
| ADSVKGRFTI SRDNSKNTLY LQMNSLRAED TAVYYCARQP MISAFDIWGQ GTMVTVSSAS | 120 |
| TKGPSVFPLA PSSKS | 135 |
| M76-G02 LC | |
| QDIQMTQSPS SLSASVGDRV TITCRASQSI SSYLNWYQQK PGKAPKLLIY AASSLQSGVP | 60 |
| SRFSGSGSGT DFTLTISSLQ PEDFATYYCQ QSYSTPPWTF GQGTKVEIK | 109 |
| M76-G02 HC | |
| EVQLLESGGG LVQPGGSLRL SCAASGFTFS LYAMWWVRQA PGKGLEWVSY ISSSGGFTSY | 60 |
| ADSVKGRFTI SRDNSKNTLY LQMNSLRAED TAVYYCARYR VGVAATDYWG QGTLVTVSSA | 120 |
| STKGPSVFPL APSSKS | 136 |
| M76-G06 LC | |
| QDIQMTQSPS SLSASVRDRV TITCRASQSI STYLNWYQQK PGEAPKLLVF AASSLQSGVP | 60 |
| SRFSGSGSGT DFTLSISSLQ PEDFATYYCQ QSYSTPHTFG QGAKVEIK | 108 |
| M76-G06 HC | |
| EVQLLESGGG LVQPGGSLRL SCAASGFTFS GYIMHWVRQA PGKGLEWVSW IYPSGGWTEY | 60 |
| ADSVKGRFTI SRDNSKNTLY LQMNSLRAED TAVYYCARDA PGVGAIDYWG QGTLVTVSSA | 120 |
| STKGPSVFPL APSSKS | 136 |
| M76-H02 LC | |
| QDIQMTQSPS SLSASEGDRV TITCRASQDI SVYLNWYQMK SGKAPKLLIY GGASLQSGVP | 60 |
| ARFSGSGYGT DFTLTITDLR PEDFATYYCQ QSYSLPFTFG GGTKVEIK | 108 |
| M76-H02 HC | |
| EVQLLESGGG LVQPGGSLRL SCAASGFTFS MYWMQWVRQA PGKGLEWVSY IYPSGGPTKY | 60 |
| ADSVKGRFTI SRDNSKNTLY LQMNSLRAED TAVYYCARPS GSYGDAFDIW GQGTMVTVSS | 120 |
| ASTKGPSVFP LAPSSKS | 137 |
| M77-C07 LC | |
| QDIQMTQSPS TLSASVGDRV TITCRASQNI SSYLNWYQQK PGKAPKLLIY AASSLQSGVP | 60 |
| SRFSGSGSGT DFTLTISSLQ PEDFATYSCQ QSYSTPRTFG QGTKVEIK | 108 |
| M77-C07 HC | |
| EVQLLESGGG LVQPGGSLRL SCAASGFTFS LYIMGWVRQA PGKGLEWVSG IYPSGGFTMY | 60 |
| ADSVKGRFTI SRDNSKNTLY LQMNSLRAED TAVYYCARES SGVAAPDYWG QGTLVTVSSA | 120 |
| STKGPSVFPL APSSKS | 136 |
| M77-H04 LC | |
| QDIQMTQSPL SLPVTPGEPA SISCRSSQSL LHSRGYNYLD WYLQKPGQSP QLLIYLGSNR | 60 |
| ASGVPDRFSG SGSGTDFTLK ISRVEAEDVG VYYCMQALQR RTFGQGTKLE IK | 112 |
| M77-H04 HC | |
| EVQLLESGGG LVQPGGSLRL SCAASGFTFS YYTMIWVRQA PGKGLEWVSG IRSSGGGTRY | 60 |
| ADSVKGRFTI SRDNSKNTLY LQMNSLRAED TAVYYCAKDG SRYSYGSIYY YYGMDAWGQG | 120 |
| TTVTVSSAST KGPSVFPLAP SSKS | 144 |

### Example 2

### Lead Antibody Inhibitors

[0861] Antibodies were selected as lead plasma kallikrein inhibitors on the basis of apparent inhibition constant (K_{i,app}), specificity with respect to lack of inhibition of other serine proteases, inhibition of bradykinin generation, and lack of binding to plasma prekallikrein (Table 3). Plasma kallikrein circulates in the plasma as an inactive zymogen (prekallikrein) at a concentration of approximately 500 nM. Antibodies that bound prekallikrein may be rendered inaccessible towards active plasma kallikrein inhibition and could substantially increase the in vivo dose required for efficacy. Therefore, a surface plasmon resonance (SPR) assay was used to identify antibodies that do not bind prekallikrein (data not shown). Specifically, human IgGs (X81-B01, M162-A04 (R84-H05); M160-G12 (R84-D02); and M142-H08) were captured on a CM5 chip using an anti-human Fc surface and 100 nM of plasma kallikrein or 100 nM or 500 nM prekallikrein. The prekallikrein was treated with aprotinin-sepharose to remove active plasma kallikrein. The prekallikrein used for X81-B01 was buffer exchanged into the exact preparation of SPR running buffer (HEPES buffered saline) to avoid the refractive index shift that was observed with three other antibodies that were tested: M162-A04 (R84-H05); M160-G12 (R84-D02); and M142-H08.

[0862] Of the antibodies listed in Table 3, only M142-H08 inhibits human plasma kallikrein with a subnanomolar K_{i,app}. However, when M142-H08 was produced as an IgG it was found to be cleaved in the CDR3 of the heavy chain. Consequently, we decided to undertake two approaches to improve the affinity: 1) affinity maturation of M162-A04 and M160-G12 using a novel form of light chain shuffling called ROLIC (Rapid Optimization of Light Chains) (see, e.g., WO 2009/102927 and U.S. 2009-0215119); and 2) sequence optimization of M142-H08 in order to prevent the cleavage of the IgG that occurs while retaining the binding and inhibitor properties of M142-H08.

TABLE 3
Top Ranking Antibody Inhibitors of PKal Before
Affinity Maturation or Sequence Optimization

| Criteria | M162-A04 | M160-G12 | M142-H08^{a} |
|---|---|---|---|
| K_{i, app} human pKal | 2 nM (as an | 5.6 nM (as an | 0.6 nM (as a |
| | IgG) | IgG) | Fab) |
| K_{i, app} rodent pKal | 2 nM (mouse | <1 nM (mouse) | ~1 nM (mouse |
| | and rat) | | and rat) |
| Binds prekallikrein? | No | No | No |
| Specific inhibitor with | Yes | Yes | Yes |
| respect to fXIa, plasmin, | | | |
| and trypsin | | | |
| Inhibits bradykinin | Yes | Yes | Yes |
| generation | | | |

^{a}When M142-H08 was produced as an IgG it was determined to be cleaved in the CDR3 of its heavy chain (GGLLLWFR-ELKSNYFDY).

### Example 3

### Sequence Optimization of M142-H08

[0863] Of the antibodies listed in Table 3, only M142-H08 inhibits human pKal with a subnanomolar K_{i,app}. However, when M142-H08 was produced as an IgG it was found to be cleaved in the CDR3 of the heavy chain. M142-H08 was found by mass spectrometry to be cleaved after the arginine in the “WFR” sequence of the HC-CDR3 sequence (GGLLLWFRELKSNYFDY). This cleavage suggests that a protease from the cells used to express the antibody (both CHO and 293T human kidney cells) is enzymatically cleaving the antibody at a single specific site. We mutated the HC-CDR3 sequence of M142-H08 in order to identify amino acid substitutions that prevent the cleavage of the IgG that occurs while retaining the binding and inhibitor properties of M142-H08. Previous experience with similarly “clipped” antibodies suggested that focusing simply on the putative P1 position (protease subsite 1, see Table 4) may not be sufficient to identify antibodies that retain potent inhibition of the target enzyme while not being clipped by a host cell protease. Therefore, we created a small library of single point mutations in the region around the cleavage site in order to identify variants of M142-H08 that are not clipped but are still potent pKal inhibitors. We refer to this library as the “CDR3 by Design” library. The small library was constructed using a PCR primer that contains the randomized codon NNK at either the P3, the P2, the P1, or the P1′ site. This results in a small library where each of the 4 positions may contain any of the 20 amino acids (20+20+20+20=80 members). Using PCR, this library was cloned into the M142-H08Fab sequence in the pMid21 vector, which is a standard phagemid vector.

TABLE 4
Primer sequences

| | | |
|---|---|---|
| Primer Name | Sequence | N |

| | | |
|---|---|---|
| | P3 P2 P1 P1′ P2′ | |
| | G G L L L W F R E L K | |
| | S N Y | |
| 559A.P1.top | GGC GGT CTA TTA CTA TGG TTC NNK GAG CTG | 20 |
| | AAG TCT AAC TAC | |
| 559A.P2.top | GGC GGT CTA TTA CTA TGG NNK AGG GAG CTG | 20 |
| | AAG TCT AAC TAC | |
| 559A.P3.top | GGC GGT CTA TTA CTA NNK TTC AGG GAG CTG | 20 |
| | AAG TCT AAC TAC | |
| 559A.P1p.top | GGC GGT CTA TTA CTA TGG TTC AGG NNK CTG | 20 |
| | AAG TCT AAC TAC | |

[0864] By DNA sequencing, we recovered 61 of the possible 80 antibodies (Table 5). These antibodies were produced as Fab fragments in small scale (˜20 μg) and tested for inhibition against human pKal in an in vitro protease cleavage assay using Pro-Phe-Arg-aminomethylcoumarin as the synthetic peptide substrate. The Fabs that were found to be inhibitors of human pKal were subcloned into our pBRH1f vector (a vector for transient expression of IgGs in 293T cells) for conversion to full length human IgG1 antibodies. Five antibodies were then expressed in 293T cells and purified by protein A sepharose chromatography. The antibodies were analyzed by SDS-PAGE to determine which of the inhibitory mutants are not cleaved by the host cell protease(s) (data not shown). The cleaved antibodies (559A-X67-G05, 559A-X67-H01, 559A-X67-G09) had an extra band that migrated between the 38 and the 49 kDa molecular weight marker. This band is absent in the 559A-X67-H04 and 559A-X67-D03 antibodies, which indicates that these antibodies are intact.

[0865] K_{i,app} values were determined by steady state enzyme kinetics for those that were shown by SDS-PAGE to be not cleaved (Table 5). Interestingly, the P2 position was the only position where amino acid substitutions yielded intact antibody inhibitors of pKal. Of the 14 different mutations that were recovered at the P3 position (Table 5), only one mutant (W to L) was found to be a pKal inhibitor as a Fab but it was subsequently shown to be clipped as an IgG. None of the 16 different mutations at the P1 position (Table 5) were found to be pKal inhibitors. Eight of the 15 different mutations at the P1′ position were found to be inhibitors of pKal as a Fab but all were clipped as an IgG. Consequently, only mutations at the P2 position led to antibody inhibitors that were not clipped during expression. Of the 16 different mutations that were recovered at the P2 position (Table 5), eight mutants were found to be a pKal inhibitor as a Fab but it was subsequently shown to be clipped as an IgG. Four mutants at the P2 position were found to have subnanomolar K_{i,app} values: X67-G04 (F to A), X67-C03 (F to M), X67-F01 (F to Q) and X67-D03 (F to N). The antibody with the highest potency is X67-D03 (K_{i,app}=0.1 nM). The two antibodies shown in Table 6 were not cleaved when expressed as IgGs and were found to inhibit pKal with a subnanomolar K_{i,app}.

[0866] DNA and amino acid sequence alignments of the light chains of nongermlined (X63-G06) and germlined, codon optimized (X81-B01) versions of the same antibody discovered using ROLIC affinity maturation are shown in FIGS. 4 and 5, respectively. DNA and amino acid sequence alignments of the heavy chains of nongermlined (X63-G06) and germlined, codon optimized (X81-B01) versions of the same antibody discovered using ROLIC affinity maturation are shown in FIGS. 6 and 7, respectively.

TABLE 5
HV-CDR3 Sequences Obtained from “CDR3 by Design” Library*

| | | | | | Ki, app |
|---|---|---|---|---|---|
| | | | Inhibit | Intact | as an |
| Mutation | | | as a | as an | IgG |
| Site | Antibody I.D. | HV-CDR3 | Fab? | IgG? | (nM) |
| Parental | X69-C09 | GGLLLWFRELKSNYFDY | Yes | No | 0.2 |
| P3 | X68-E07 | GGLLLAFRELKSNYFDY | No | n/a | n/a |
| P3 | X68-E12 | GGLLLCFRELKSNYFDY | No | n/a | n/a |
| P3 | X68-A03 | GGLLLDFRELKSNYFDY | No | n/a | n/a |
| P3 | X68-E03 | GGLLLEFRELKSNYFDY | No | n/a | n/a |
| P3 | X68-A12 | GGLLLGFRELKSNYFDY | No | n/a | n/a |
| P3 | X68-D11 | GGLLLKFRELKSNYFDY | No | n/a | n/a |
| P3 | X68-E01 | GGLLLLFRELKSNYFDY | Yes | No | n/a |
| P3 | X68-F05 | GGLLLMFRELKSNYFDY | No | n/a | n/a |
| P3 | X68-D10 | GGLLLPFRELKSNYFDY | No | n/a | n/a |
| P3 | X68-F10 | GGLLLQFRELKSNYFDY | No | n/a | n/a |
| P3 | X68-G01 | GGLLLRFRELKSNYFDY | No | n/a | n/a |
| P3 | X68-G05 | GGLLLSFRELKSNYFDY | No | n/a | n/a |
| P3 | X68-F12 | GGLLLTFRELKSNYFDY | No | n/a | n/a |
| P3 | X68-H04 | GGLLLVFRELKSNYFDY | No | n/a | n/a |
| P2 | X67-G04 | GGLLLWARELKSNYFDY | Yes | Yes | 0.35 |
| P2 | X67-G01 | GGLLLWCRELKSNYFDY | No | n/a | n/a |
| P2 | X67-E04 | GGLLLWDRELKSNYFDY | Yes | Yes | 1.3 |
| P2 | X67-H04 | GGLLLWERELKSNYFDY | Yes | Yes | 3.6 |
| P2 | X67-C09 | GGLLLWGRELKSNYFDY | Yes | Yes | 8.6 |
| P2 | X67-B04 | GGLLLWKRELKSNYFDY | Yes | No | n/a |
| P2 | X67-G09 | GGLLLWLRELKSNYFDY | Yes | No | n/a |
| P2 | X67-C03 | GGLLLWMRELKSNYFDY | Yes | Yes | 0.7 |
| P2 | X67-D03 | GGLLLWNRELKSNYFDY | Yes | Yes | 0.1 |
| P2 | X67-B05 | GGLLLWPRELKSNYFDY | No | n/a | n/a |
| P2 | X67-F01 | GGLLLWQRELKSNYFDY | Yes | Yes | 0.9 |
| P2 | X67-G05 | GGLLLWRRELKSNYFDY | Yes | No | n/a |
| P2 | X67-B03 | GGLLLWSRELKSNYFDY | Yes | Yes | 2.1 |
| P2 | X67-F10 | GGLLLWTRELKSNYFDY | Yes | Yes | 1.3 |
| P2 | X67-H01 | GGLLLWWRELKSNYFDY | Yes | No | n/a |
| P2 | X67-F08 | GGLLLWYRELKSNYFDY | Yes | No | n/a |
| P1 | X66-E09 | GGLLLWFAELKSNYFDY | No | n/a | n/a |
| P1 | X66-B05 | GGLLLWFCELKSNYFDY | No | n/a | n/a |
| P1 | X66-D03 | GGLLLWFEELKSNYFDY | No | n/a | n/a |
| P1 | X66-H04 | GGLLLWFFELKSNYFDY | No | n/a | n/a |
| P1 | X66-H02 | GGLLLWFGELKSNYFDY | No | n/a | n/a |
| P1 | X66-C11 | GGLLLWFHELKSNYFDY | No | n/a | n/a |
| P1 | X66-A07 | GGLLLWFKELKSNYFDY | No | n/a | n/a |
| P1 | X66-C03 | GGLLLWFLELKSNYFDY | No | n/a | n/a |
| P1 | X66-G05 | GGLLLWFMELKSNYFDY | No | n/a | n/a |
| P1 | X66-F10 | GGLLLWFPELKSNYFDY | No | n/a | n/a |
| P1 | X66-E04 | GGLLLWFQELKSNYFDY | No | n/a | n/a |
| P1 | X66-F01 | GGLLLWFSELKSNYFDY | No | n/a | n/a |
| P1 | X66-H11 | GGLLLWFTELKSNYFDY | No | n/a | n/a |
| P1 | X66-C02 | GGLLLWFVELKSNYFDY | No | n/a | n/a |
| P1 | X66-F09 | GGLLLWFWELKSNYFDY | No | n/a | n/a |
| P1 | X66-G08 | GGLLLWFYELKSNYFDY | No | n/a | n/a |
| P1′ | X69-D08 | GGLLLWFRALKSNYFDY | No | n/a | n/a |
| P1′ | X69-B02 | GGLLLWFRCLKSNYFDY | No | n/a | n/a |
| P1′ | X69-D09 | GGLLLWFRGLKSNYFDY | Yes | No | n/a |
| P1′ | X69-D02 | GGLLLWFRHLKSNYFDY | No | n/a | n/a |
| P1′ | X69-A12 | GGLLLWFRKLKSNYFDY | No | n/a | n/a |
| P1′ | X69-F05 | GGLLLWFRLLKSNYFDY | Yes | No | n/a |
| P1′ | X69-B08 | GGLLLWFRNLKSNYFDY | Yes | No | n/a |
| P1′ | X69-A10 | GGLLLWFRPLKSNYFDY | No | n/a | n/a |
| P1′ | X69-A09 | GGLLLWFRQLKSNYFDY | Yes | No | n/a |
| P1′ | X69-E05 | GGLLLWFRRLKSNYFDY | No | n/a | n/a |
| P1′ | X69-F09 | GGLLLWFRSLKSNYFDY | Yes | No | n/a |
| P1′ | X69-F01 | GGLLLWFRTLKSNYFDY | Yes | No | n/a |
| P1′ | X69-C12 | GGLLLWFRVLKSNYFDY | Yes | No | n/a |
| P1′ | X69-E01 | GGLLLWFRWLKSNYFDY | Yes | No | n/a |
| P1′ | X69-H10 | GGLLLWFRYLKSNYFDY | No | n/a | n/a |

*All of these antibodies are single point mutations of the M142-H08 sequence.

[0867] Amino acid sequences of light chain (LC) and heavy chain (HC) variable domain of pKal antibodies with designed HC CDR3s are shown below.

| X68-E07 LC | |
|---|---|
| QDIQMTQSPS SLSAFVGDRV TITCRASQPI DNYLNWYHQK PGKAPKLLIY AASRLQSGVP | 60 |
| SRLSGSGFGT DFTLTISSLQ PEDFGNYYCQ QSYTVPYTFG GGTKVEIR | 108 |
| X68-E07 HC | |
| EVQLLESGGG LVQPGGSLRL SCAASGFTFS AYSMIWVRQA PGKGLEWVSY IRPSGGRTTY | 60 |
| ADSVKGRFTI SRDNSKNTLY LQMNSLRAED TAVYYCARGG LLLAFRELKS NYFDYWGQGT | 120 |
| LVTVSSASTK GPSVFPLAPS SKS | 143 |
| X68-E12 LC | |
| QDIQMTQSPS SLSAFVGDRV TITCRASQPI DNYLNWYHQK PGKAPKLLIY AASRLQSGVP | 60 |
| SRLSGSGFGT DFTLTISSLQ PEDFGNYYCQ QSYTVPYTFG GGTKVEIR | 108 |
| X68-E12 HC | |
| EVQLLESGGG LVQPGGSLRL SCAASGFTFS AYSMIWVRQA PGKGLEWVSY IRPSGGRTTY | 60 |
| ADSVKGRFTI SRDNSKNTLY LQMNSLRAED TAVYYCARGG LLLCFRELKS NYFDYWGQGT | 120 |
| LVTVSSASTK GPSVFPLAPS SKS | 143 |
| X68-A03 LC | |
| QDIQMTQSPS SLSAFVGDRV TITCRASQPI DNYLNWYHQK PGKAPKLLIY AASRLQSGVP | 60 |
| SRLSGSGFGT DFTLTISSLQ PEDFGNYYCQ QSYTVPYTFG GGTKVEIR | 108 |
| X68-A03 HC | |
| EVQLLESGGG LVQPGGSLRL SCAASGFTFS AYSMIWVRQA PGKGLEWVSY IRPSGGRTTY | 60 |
| ADSVKGRFTI SRDNSKNTLY LQMNSLRAED TAVYYCARGG LLLDFRELKS NYFDYWGQGT | 120 |
| LVTVSSASTK GPSVFPLAPS SKS | 143 |
| X68-E03 LC | |
| QDIQMTQSPS SLSAFVGDRV TITCRASQPI DNYLNWYHQK PGKAPKLLIY AASRLQSGVP | 60 |
| SRLSGSGFGT DFTLTISSLQ PEDFGNYYCQ QSYTVPYTFG GGTKVEIR | 108 |
| X68-E03 HC | |
| EVQLLESGGG LVQPGGSLRL SCAASGFTFS AYSMIWVRQA PGKGLEWVSY IRPSGGRTTY | 60 |
| ADSVKGRFTI SRDNSKNTLY LQMNSLRAED TAVYYCARGG LLLEFRELKS NYFDYWGQGT | 120 |
| LVTVSSASTK GPSVFPLAPS SKS | 143 |
| X68-A12 LC | |
| QDIQMTQSPS SLSAFVGDRV TITCRASQPI DNYLNWYHQK PGKAPKLLIY AASRLQSGVP | 60 |
| SRLSGSGFGT DFTLTISSLQ PEDFGNYYCQ QSYTVPYTFG GGTKVEIR | 108 |
| X68-A12 HC | |
| EVQLLESGGG LVQPGGSLRL SCAASGFTFS AYSMIWVRQA PGKGLEWVSY IRPSGGRTTY | 60 |
| ADSVKGRFTI SRDNSKNTLY LQMNSLRAED TAVYYCARGG LLLGFRELKS NYFDYWGQGT | 120 |
| LVTVSSASTK GPSVFPLAPS SKS | 143 |
| X68-D11 LC | |
| QDIQMTQSPS SLSAFVGDRV TITCRASQPI DNYLNWYHQK PGKAPKLLIY AASRLQSGVP | 60 |
| SRLSGSGFGT DFTLTISSLQ PEDFGNYYCQ QSYTVPYTFG GGTKVEIR | 108 |
| X68-D11 HC | |
| EVQLLESGGG LVQPGGSLRL SCAASGFTFS AYSMIWVRQA PGKGLEWVSY IRPSGGRTTY | 60 |
| ADSVKGRFTI SRDNSKNTLY LQMNSLRAED TAVYYCARGG LLLKFRELKS NYFDYWGQGT | 120 |
| LVTVSSASTK GPSVFPLAPS SKS | 143 |
| X68-E01 LC | |
| QDIQMTQSPS SLSAFVGDRV TITCRASQPI DNYLNWYHQK PGKAPKLLIY AASRLQSGVP | 60 |
| SRLSGSGFGT DFTLTISSLQ PEDFGNYYCQ QSYTVPYTFG GGTKVEIR | 108 |
| X68-E01 HC | |
| EVQLLESGGG LVQPGGSLRL SCAASGFTFS AYSMIWVRQA PGKGLEWVSY IRPSGGRTTY | 60 |
| ADSVKGRFTI SRDNSKNTLY LQMNSLRAED TAVYYCARGG LLLLFRELKS NYFDYWGQGT | 120 |
| LVTVSSASTK GPSVFPLAPS SKS | 143 |
| X68-F05 LC | |
| QDIQMTQSPS SLSAFVGDRV TITCRASQPI DNYLNWYHQK PGKAPKLLIY AASRLQSGVP | 60 |
| SRLSGSGFGT DFTLTISSLQ PEDFGNYYCQ QSYTVPYTFG GGTKVEIR | 108 |
| X68-F05 HC | |
| EVQLLESGGG LVQPGGSLRL SCAASGFTFS AYSMIWVRQA PGKGLEWVSY IRPSGGRTTY | 60 |
| ADSVKGRFTI SRDNSKNTLY LQMNSLRAED TAVYYCARGG LLLMFRELKS NYFDYWGQGT | 120 |
| LVTVSSASTK GPSVFPLAPS SKS | 143 |
| X68-D10 LC | |
| QDIQMTQSPS SLSAFVGDRV TITCRASQPI DNYLNWYHQK PGKAPKLLIY AASRLQSGVP | 60 |
| SRLSGSGFGT DFTLTISSLQ PEDFGNYYCQ QSYTVPYTFG GGTKVEIR | 108 |
| X68-D10 HC | |
| EVQLLESGGG LVQPGGSLRL SCAASGFTFS AYSMIWVRQA PGKGLEWVSY IRPSGGRTTY | 60 |
| ADSVKGRFTI SRDNSKNTLY LQMNSLRAED TAVYYCARGG LLLPFRELKS NYFDYWGQGT | 120 |
| LVTVSSASTK GPSVFPLAPS SKS | 143 |
| X68-F10 LC | |
| QDIQMTQSPS SLSAFVGDRV TITCRASQPI DNYLNWYHQK PGKAPKLLIY AASRLQSGVP | 60 |
| SRLSGSGFGT DFTLTISSLQ PEDFGNYYCQ QSYTVPYTFG GGTKVEIR | 108 |
| X68-F10 HC | |
| EVQLLESGGG LVQPGGSLRL SCAASGFTFS AYSMIWVRQA PGKGLEWVSY IRPSGGRTTY | 60 |
| ADSVKGRFTI SRDNSKNTLY LQMNSLRAED TAVYYCARGG LLLQFRELKS NYFDYWGQGT | 120 |
| LVTVSSASTK GPSVFPLAPS SKS | 143 |
| X68-G01 LC | |
| QDIQMTQSPS SLSAFVGDRV TITCRASQPI DNYLNWYHQK PGKAPKLLIY AASRLQSGVP | 60 |
| SRLSGSGFGT DFTLTISSLQ PEDFGNYYCQ QSYTVPYTFG GGTKVEIR | 108 |
| X68-G01 HC | |
| EVQLLESGGG LVQPGGSLRL SCAASGFTFS AYSMIWVRQA PGKGLEWVSY IRPSGGRTTY | 60 |
| ADSVKGRFTI SRDNSKNTLY LQMNSLRAED TAVYYCARGG LLLRFRELKS NYFDYWGQGT | 120 |
| LVTVSSASTK GPSVFPLAPS SKS | 143 |
| X68-G05 LC | |
| QDIQMTQSPS SLSAFVGDRV TITCRASQPI DNYLNWYHQK PGKAPKLLIY AASRLQSGVP | 60 |
| SRLSGSGFGT DFTLTISSLQ PEDFGNYYCQ QSYTVPYTFG GGTKVEIR | 108 |
| X68-G05 HC | |
| EVQLLESGGG LVQPGGSLRL SCAASGFTFS AYSMIWVRQA PGKGLEWVSY IRPSGGRTTY | 60 |
| ADSVKGRFTI SRDNSKNILY LQMNSLRAED TAVYYCARGG LLLSFRELKS NYFDYWGQGT | 120 |
| LVTVSSASTK GPSVFPLAPS SKS | 143 |
| X68-F12 LC | |
| QDIQMTQSPS SLSAFVGDRV TITCRASQPI DNYLNWYHQK PGKAPKLLIY AASRLQSGVP | 60 |
| SRLSGSGFGT DFTLTISSLQ PEDFGNYYCQ QSYTVPYTFG GGTKVEIR | 108 |
| X68-F12 HC | |
| EVQLLESGGG LVQPGGSLRL SCAASGFTFS AYSMIWVRQA PGKGLEWVSY IRPSGGRTTY | 60 |
| ADSVKGRFTI SRDNSKNTLY LQMNSLRAED TAVYYCARGG LLLTFRELKS NYFDYWGQGT | 120 |
| LVTVSSASTK GPSVFPLAPS SKS | 143 |
| X68-H04 LC | |
| QDIQMTQSPS SLSAFVGDRV TITCRASQPI DNYLNWYHQK PGKAPKLLIY AASRLQSGVP | 60 |
| SRLSGSGFGT DFTLTISSLQ PEDFGNYYCQ QSYTVPYTFG GGTKVEIR | 108 |
| X68-H04 HC | |
| EVQLLESGGG LVQPGGSLRL SCAASGFTFS AYSMIWVRQA PGKGLEWVSY IRPSGGRTTY | 60 |
| ADSVKGRFTI SRDNSKNTLY LQMNSLRAED TAVYYCARGG LLLVFRELKS NYFDYWGQGT | 120 |
| LVTVSSASTK GPSVFPLAPS SKS | 143 |
| X67-G04 LC | |
| QDIQMTQSPS SLSAFVGDRV TITCRASQPI DNYLNWYHQK PGKAPKLLIY AASRLQSGVP | 60 |
| SRLSGSGFGT DFTLTISSLQ PEDFGNYYCQ QSYTVPYTFG GGTKVEIR | 108 |
| X67-G04 HC | |
| EVQLLESGGG LVQPGGSLRL SCAASGFTFS AYSMIWVRQA PGKGLEWVSY IRPSGGRTTY | 60 |
| ADSVKGRFTI SRDNSKNTLY LQMNSLRAED TAVYYCARGG LLLWARELKS NYFDYWGQGT | 120 |
| LVTVSSASTK GPSVFPLAPS SKS | 143 |
| X67-G01 LC | |
| QDIQMTQSPS SLSAFVGDRV TITCRASQPI DNYLNWYHQK PGKAPKLLIY AASRLQSGVP | 60 |
| SRLSGSGFGT DFTLTISSLQ PEDFGNYYCQ QSYTVPYTFG GGTKVEIR | 108 |
| X67-G01 HC | |
| EVQLLESGGG LVQPGGSLRL SCAASGFTFS AYSMIWVRQA PGKGLEWVSY IRPSGGRTTY | 60 |
| ADSVKGRFTI SRDNSKNTLY LQMNSLRAED TAVYYCARGG LLLWCRELKS NYFDYWGQGT | 120 |
| LVTVSSASTK GPSVFPLAPS SKS | 143 |
| X67-E04 LC | |
| QDIQMTQSPS SLSAFVGDRV TITCRASQPI DNYLNWYHQK PGKAPKLLIY AASRLQSGVP | 60 |
| SRLSGSGFGT DFTLTISSLQ PEDFGNYYCQ QSYTVPYTFG GGTKVEIR | 108 |
| X67-E04 HC | |
| EVQLLESGGG LVQPGGSLRL SCAASGFTFS AYSMIWVRQA PGKGLEWVSY IRPSGGRTTY | 60 |
| ADSVKGRFTI SRDNSKNTLY LQMNSLRAED TAVYYCARGG LLLWDRELKS NYFDYWGQGT | 120 |
| LVTVSSASTK GPSVFPLAPS SKS | 143 |
| X67-H04 LC | |
| QDIQMTQSPS SLSAFVGDRV TITCRASQPI DNYLNWYHQK PGKAPKLLIY AASRLQSGVP | 60 |
| SRLSGSGFGT DFTLTISSLQ PEDFGNYYCQ QSYTVPYTFG GGTKVEIR | 108 |
| X67-H04 HC | |
| EVQLLESGGG LVQPGGSLRL SCAASGFTFS AYSMIWVRQA PGKGLEWVSY IRPSGGRTTY | 60 |
| ADSVKGRFTI SRDNSKNTLY LQMNSLRAED TAVYYCARGG LLLWERELKS NYFDYWGQGT | 120 |
| LVTVSSASTK GPSVFPLAPS SKS | 143 |
| X66-E09 LC | |
| QDIQMTQSPS SLSAFVGDRV TITCRASQPI DNYLNWYHQK PGKAPKLLIY AASRLQSGVP | 60 |
| SRLSGSGFGT DFTLTISSLQ PEDFGNYYCQ QSYTVPYTFG GGTKVEIR | 108 |
| X66-E09 HC | |
| EVQLLESGGG LVQPGGSLRL SCAASGFTFS AYSMIWVRQA PGKGLEWVSY IRPSGGRTTY | 60 |
| ADSVKGRFTI SRDNSKNTLY LQMNSLRAED TAVYYCARGG LLLWFAELKS NYFDYWGQGT | 120 |
| LVTVSSASTK GPSVFPLAPS SKS | 143 |
| X66-B05 LC | |
| QDIQMTQSPS SLSAFVGDRV TITCRASQPI DNYLNWYHQK PGKAPKLLIY AASRLQSGVP | 60 |
| SRLSGSGFGT DFTLTISSLQ PEDFGNYYCQ QSYTVPYTFG GGTKVEIR | 108 |
| X66-B05 HC | |
| EVQLLESGGG LVQPGGSLRL SCAASGFTFS AYSMIWVRQA PGKGLEWVSY IRPSGGRTTY | 60 |
| ADSVKGRFTI SRDNSKNTLY LQMNSLRAED TAVYYCARGG LLLWFCELKS NYFDYWGQGT | 120 |
| LVTVSSASTK GPSVFPLAPS SKS | 143 |
| X66-D03 LC | |
| QDIQMTQSPS SLSAFVGDRV TITCRASQPI DNYLNWYHQK PGKAPKLLIY AASRLQSGVP | 60 |
| SRLSGSGFGT DFTLTISSLQ PEDFGNYYCQ QSYTVPYTFG GGTKVEIR | 108 |
| X66-D03 HC | |
| EVQLLESGGG LVQPGGSLRL SCAASGFTFS AYSMIWVRQA PGKGLEWVSY IRPSGGRTTY | 60 |
| ADSVKGRFTI SRDNSKNTLY LQMNSLRAED TAVYYCARGG LLLWFEELKS NYFDYWGQGT | 120 |
| LVTVSSASTK GPSVFPLAPS SKS | 143 |
| X66-H04 LC | |
| QDIQMTQSPS SLSAFVGDRV TITCRASQPI DNYLNWYHQK PGKAPKLLIY AASRLQSGVP | 60 |
| SRLSGSGFGT DFTLTISSLQ PEDFGNYYCQ QSYTVPYTFG GGTKVEIR | 108 |
| X66-H04 HC | |
| EVQLLESGGG LVQPGGSLRL SCAASGFTFS AYSMIWVRQA PGKGLEWVSY IRPSGGRTTY | 60 |
| ADSVKGRFTI SRDNSKNTLY LQMNSLRAED TAVYYCARGG LLLWFFELKS NYFDYWGQGT | 120 |
| LVTVSSASTK GPSVFPLAPS SKS | 143 |
| X66-H02 LC | |
| QDIQMTQSPS SLSAFVGDRV TITCRASQPI DNYLNWYHQK PGKAPKLLIY AASRLQSGVP | 60 |
| SRLSGSGFGT DFTLTISSLQ PEDFGNYYCQ QSYTVPYTFG GGTKVEIR | 108 |
| X66-H02 HC | |
| EVQLLESGGG LVQPGGSLRL SCAASGFTFS AYSMIWVRQA PGKGLEWVSY IRPSGGRTTY | 60 |
| ADSVKGRFTI SRDNSKNTLY LQMHSLRAED TAVYYCARGG LLLWFGELKS NYFDYWGQGT | 120 |
| LVTVSSASTK GPSVFPLAPS SKS | 143 |
| X66-C11 LC | |
| QDIQMTQSPS SLSAFVGDRV TITCRASQPI DNYLNWYHQK PGKAPKLLIY AASRLQSGVP | 60 |
| SRLSGSGFGT DFTLTISSLQ PEDFGNYYCQ QSYTVPYTFG GGTKVEIR | 108 |
| X66-C11 HC | |
| EVQLLESGGG LVQPGGSLRL SCAASGFTFS AYSMIWVRQA PGKGLEWVSY IRPSGGRTTY | 60 |
| ADSVKGRFTI SRDNSKNTLY LQMNSLRAED TAVYYCARGG LLLWFHELKS NYFDYWGQGT | 120 |
| LVTVSSASTK GPSVFPLAPS SKS | 143 |
| X66-A07 LC | |
| QDIQMTQSPS SLSAFVGDRV TITCRASQPI DNYLNWYHQK PGKAPKLLIY AASRLQSGVP | 60 |
| SRLSGSGFGT DFTLTISSLQ PEDFGNYYCQ QSYTVPYTFG GGTKVEIR | 108 |
| X66-A07 HC | |
| EVQLLESGGG LVQPGGSLRL SCAASGFTFS AYSMIWVRQA PGKGLEWVSY IRPSGGRTTY | 60 |
| ADSVKGRFTI SRDNSKNTLY LQMNSLRAED TAVYYCARGG LLLWFKELKS NYFDYWGQGT | 120 |
| LVTVSSASTK GPSVFPLAPS SKS | 143 |
| X66-C03 LC | |
| QDIQMTQSPS SLSAFVGDRV TITCRASQPI DNYLNWYHQK PGKAPKLLIY AASRLQSGVP | 60 |
| SRLSGSGFGT DFTLTISSLQ PEDFGNYYCQ QSYTVPYTFG GGTKVEIR | 108 |
| X66-C03 HC | |
| EVQLLESGGG LVQPGGSLRL SCAASGFTFS AYSMIWVRQA PGKGLEWVSY IRPSGGRTTY | 60 |
| ADSVKGRFTI SRDNSKNTLY LQMNSLRAED TAVYYCARGG LLLWFLELKS NYFDYWGQGT | 120 |
| LVTVSSASTK GPSVFPLAPS SKS | 143 |
| X66-G05 LC | |
| QDIQMTQSPS SLSAFVGDRV TITCRASQPI DNYLNWYHQK PGKAPKLLIY AASRLQSGVP | 60 |
| SRLSGSGFGT DFTLTISSLQ PEDFGNYYCQ QSYTVPYTFG GGTKVEIR | 108 |
| X66-G05 HC | |
| EVQLLESGGG LVQPGGSLRL SCAASGFTFS AYSMIWVRQA PGKGLEWVSY IRPSGGRTTY | 60 |
| ADSVKGRFTI SRDNSKNTLY LQMNSLRAED TAVYYCARGG LLLWFMELKS NYFDYWGQGT | 120 |
| LVTVSSASTK GPSVFPLAPS SKS | 143 |
| X66-F10 LC | |
| QDIQMTQSPS SLSAFVGDRV TITCRASQPI DNYLNWYHQK PGKAPKLLIY AASRLQSGVP | 60 |
| SRLSGSGFGT DFTLTISSLQ PEDFGNYYCQ QSYTVPYTFG GGTKVEIR | 108 |
| X66-F10 HC | |
| EVQLLESGGG LVQPGGSLRL SCAASGFTFS AYSMIWVRQA PGKGLEWVSY IRPSGGRTTY | 60 |
| ADSVKGRFTI SRDNSKNTLY LQMNSLRAED TAVYYCARGG LLLWFPELKS NYFDYWGQGT | 120 |
| LVTVSSASTK GPSVFPLAPS SKS | 143 |
| X66-E04 LC | |
| QDIQMTQSPS SLSAFVGDRV TITCRASQPI DNYLNWYHQK PGKAPKLLIY AASRLQSGVP | 60 |
| SRLSGSGFGT DFTLTISSLQ PEDFGNYYCQ QSYTVPYTFG GGTKVEIR | 108 |
| X66-E04 HC | |
| EVQLLESGGG LVQPGGSLRL SCAASGFTFS AYSMIWVRQA PGKGLEWVSY IRPSGGRTTY | 60 |
| ADSVKGRFTI SRDNSKNTLY LQMNSLRAED TAVYYCARGG LLLWFQELKS NYFDYWGQGT | 120 |
| LVTVSSASTK GPSVFPLAPS SKS | 143 |
| X69-D08 LC | |
| QDIQMTQSPS SLSAFVGDRV TITCRASQPI DNYLNWYHQK PGKAPKLLIY AASRLQSGVP | 60 |
| SRLSGSGFGT DFTLTISSLQ PEDFGNYYCQ QSYTVPYTFG GGTKVEIR | 108 |
| X69-D08 HC | |
| EVQLLESGGG LVQPGGSLRL SCAASGFTFS AYSMIWVRQA PGKGLEWVSY IRPSGGRTTY | 60 |
| ADSVKGRFTI SRDNSKNTLY LQMNSLRAED TAVYYCARGG LLLWFRALKS NYFDYWGQGT | 120 |
| LVTVSSASTK GPSVFPLAPS SKS | 143 |
| X69-B02 LC | |
| QDIQMTQSPS SLSAFVGDRV TITCRASQPI DNYLNWYHQK PGKAPKLLIY AASRLQSGVP | 60 |
| SRLSGSGFGT DFTLTISSLQ PEDFGNYYCQ QSYTVPYTFG GGTKVEIR | 108 |
| X69-B02 HC | |
| EVQLLESGGG LVQPGGSLRL SCAASGFTFS AYSMIWVRQA PGKGLEWVSY IRPSGGRTTY | 60 |
| ADSVKGRFTI SRDNSKNTLY LQMNSLRAED TAVYYCARGG LLLWFRCLKS NYFDYWGQGT | 120 |
| LVTVSSASTK GPSVFPLAPS SKS | 143 |
| X69-C09 LC | |
| QDIQMTQSPS SLSAFVGDRV TITCRASQPI DNYLNWYHQK PGKAPKLLIY AASRLQSGVP | 60 |
| SRLSGSGFGT DFTLTISSLQ PEDFGNYYCQ QSYTVPYTFG GGTKVEIR | 108 |
| X69-C09 HC | |
| EVQLLESGGG LVQPGGSLRL SCAASGFTFS AYSMIWVRQA PGKGLEWVSY IRPSGGRTTY | 60 |
| ADSVKGRFTI SRDNSKNTLY LQMNSLRAED TAVYYCARGG LLLWFRELKS NYFDYWGQGT | 120 |
| LVTVSSASTK GPSVFPLAPS SKS | 143 |
| X69-D09 LC | |
| QDIQMTQSPS SLSAFVGDRV TITCRASQPI DNYLNWYHQK PGKAPKLLIY AASRLQSGVP | 60 |
| SRLSGSGFGT DFTLTISSLQ PEDFGNYYCQ QSYTVPYTFG GGTKVEIR | 108 |
| X69-D09 HC | |
| EVQLLESGGG LVQPGGSLRL SCAASGFTFS AYSMIWVRQA PGKGLEWVSY IRPSGGRTTY | 60 |
| ADSVKGRFTI SRDNSKNTLY LQMNSLRAED TAVYYCARGG LLLWFRGLKS NYFDYWGQGT | 120 |
| LVTVSSASTK GPSVFPLAPS SKS | 143 |
| X69-D02 LC | |
| QDIQMTQSPS SLSAFVGDRV TITCRASQPI DNYLNWYHQK PGKAPKLLIY AASRLQSGVP | 60 |
| SRLSGSGFGT DFTLTISSLQ PEDFGNYYCQ QSYTVPYTFG GGTKVEIR | 108 |
| X69-D02 HC | |
| EVQLLESGGG LVQPGGSLRL SCAASGFTFS AYSMIWVRQA PGKGLEWVSY IRPSGGRTTY | 60 |
| ADSVKGRFTI SRDNSKNTLY LQMNSLRAED TAVYYCARGG LLLWFRHLKS NYFDYWGQGT | 120 |
| LVTVSSASTK GPSVFPLAPS SKS | 143 |
| X69-A12 LC | |
| QDIQMTQSPS SLSAFVGDRV TITCRASQPI DNYLNWYHQK PGKAPKLLIY AASRLQSGVP | 60 |
| SRLSGSGFGT DFTLTISSLQ PEDFGNYYCQ QSYTVPYTFG GGTKVEIR | 108 |
| X69-A12 HC | |
| EVQLLESGGG LVQPGGSLRL SCAASGFTFS AYSMIWVRQA PGKGLEWVSY IRPSGGRTTY | 60 |
| ADSVKGRFTI SRDNSKNTLY LQMNSLRAED TAVYYCARGG LLLWFRKLKS NYFDYWGQGT | 120 |
| LVTVSSASTK GPSVFPLAPS SKS | 143 |
| X69-F05 LC | |
| QDIQMTQSPS SLSAFVGDRV TITCRASQPI DNYLNWYHQK PGKAPKLLIY AASRLQSGVP | 60 |
| SRLSGSGFGT DFTLTISSLQ PEDFGNYYCQ QSYTVPYTFG GGTKVEIR | 108 |
| X69-F05 HC | |
| EVQLLESGGG LVQPGGSLRL SCAASGFTFS AYSMIWVRQA PGKGLEWVSY IRPSGGRTTY | 60 |
| ADSVKGRFTI SRDNSKNTLY LQMNSLRAED TAVYYCARGG LLLWFRLLKS NYFDYWGQGT | 120 |
| LVTVSSASTK GPSVFPLAPS SKS | 143 |
| X69-B08 LC | |
| QDIQMTQSPS SLSAFVGDRV TITCRASQPI DNYLNWYHQK PGKAPKLLIY AASRLQSGVP | 60 |
| SRLSGSGFGT DFTLTISSLQ PEDFGNYYCQ QSYTVPYTFG GGTKVEIR | 108 |
| X69-B08 HC | |
| EVQLLESGGG LVQPGGSLRL SCAASGFTFS AYSMIWVRQA PGKGLEWVSY IRPSGGRTTY | 60 |
| ADSVKGRFTI SRDNSKNTLY LQMNSLRAED TAVYYCARGG LLLWFRNLKS NYFDYWGQGT | 120 |
| LVTVSSASTK GPSVFPLAPS SKS | 143 |
| X69-A10 LC | |
| QDIQMTQSPS SLSAFVGDRV TITCRASQPI DNYLNWYHQK PGKAPKLLIY AASRLQSGVP | 60 |
| SRLSGSGFGT DFTLTISSLQ PEDFGNYYCQ QSYTVPYTFG GGTKVEIR | 108 |
| X69-A10 HC | |
| EVQLLESGGG LVQPGGSLRL SCAASGFTFS AYSMIWVRQA PGKGLEWVSY IRPSGGRTTY | 60 |
| ADSVKGRFTI SRDNSKNTLY LQMNSLRAED TAVYYCARGG LLLWFRPLKS NYFDYWGQGT | 120 |
| LVTVSSASTK GPSVFPLAPS SKS | 143 |
| X69-A09 LC | |
| QDIQMTQSPS SLSAFVGDRV TITCRASQPI DNYLNWYHQK PGKAPKLLIY AASRLQSGVP | 60 |
| SRLSGSGFGT DFTLTISSLQ PEDFGNYYCQ QSYTVPYTFG GGTKVEIR | 108 |
| X69-A09 HC | |
| EVQLLESGGG LVQPGGSLRL SCAASGFTFS AYSMIWVRQA PGKGLEWVSY IRPSGGRTTY | 60 |
| ADSVKGRFTI SRDNSKNTLY LQMNSLRAED TAVYYCARGG LLLWFRQLKS NYFDYWGQGT | 120 |
| LVTVSSASTK GPSVFPLAPS SKS | 143 |
| X69-E05 LC | |
| QDIQMTQSPS SLSAFVGDRV TITCRASQPI DNYLNWYHQK PGKAPKLLIY AASRLQSGVP | 60 |
| SRLSGSGFGT DFTLTISSLQ PEDFGNYYCQ QSYTVPYTFG GGTKVEIR | 108 |
| X69-E05 HC | |
| EVQLLESGGG LVQPGGSLRL SCAASGFTFS AYSMIWVRQA PGKGLEWVSY IRPSGGRTTY | 60 |
| ADSVKGRFTI SRDNSKNTLY LQMNSLRAED TAVYYCARGG LLLWFRRLKS NYFDYWGQGT | 120 |
| LVTVSSASTK GPSVFPLAPS SKS | 143 |
| X69-F09 LC | |
| QDIQMTQSPS SLSAFVGDRV TITCRASQPI DNYLNWYHQK PGKAPKLLIY AASRLQSGVP | 60 |
| SRLSGSGFGT DFTLTISSLQ PEDFGNYYCQ QSYTVPYTFG GGTKVEIR | 108 |
| X69-F09 HC | |
| EVQLLESGGG LVQPGGSLRL SCAASGFTFS AYSMIWVRQA PGKGLEWVSY IRPSGGRTTY | 60 |
| ADSVKGRFTI SRDNSKNTLY LQMNSLRAED TAVYYCARGG LLLWFRSLKS NYFDYWGQGT | 120 |
| LVTVSSASTK GPSVFPLAPS SKS | 143 |
| X69-F01 LC | |
| QDIQMTQSPS SLSAFVGDRV TITCRASQPI DNYLNWYHQK PGKAPKLLIY AASRLQSGVP | 60 |
| SRLSGSGFGT DFTLTISSLQ PEDFGNYYCQ QSYTVPYTFG GGTKVEIR | 108 |
| X69-F01 HC | |
| EVQLLESGGG LVQPGGSLRL SCAASGFTFS AYSMIWVRQA PGKGLEWVSY IRPSGGRTTY | 60 |
| ADSVKGRFTI SRDNSKNTLY LQMNSLRAED TAVYYCARGG LLLWFRTLKS NYFDYWGQGT | 120 |
| LVTVSSASTK GPSVFPLAPS SKS | 143 |
| X69-C12 LC | |
| QDIQMTQSPS SLSAFVGDRV TITCRASQPI DNYLNWYHQK PGKAPKLLIY AASRLQSGVP | 60 |
| SRLSGSGFGT DFTLTISSLQ PEDFGNYYCQ QSYTVPYTFG GGTKVEIR | 108 |
| X69-C12 HC | |
| EVQLLESGGG LVQPGGSLRL SCAASGFTFS AYSMIWVRQA PGKGLEWVSY IRPSGGRTTY | 60 |
| ADSVKGRFTI SRDNSKNTLY LQMNSLRAED TAVYYCARGG LLLWFRVLKS NYFDYWGQGT | 120 |
| LVTVSSASTK GPSVFPLAPS SKS | 143 |
| X69-E01 LC | |
| QDIQMTQSPS SLSAFVGDRV TITCRASQPI DNYLNWYHQK PGKAPKLLIY AASRLQSGVP | 60 |
| SRLSGSGFGT DFTLTISSLQ PEDFGNYYCQ QSYTVPYTFG GGTKVEIR | 108 |
| X69-E01 HC | |
| EVQLLESGGG LVQPGGSLRL SCAASGFTFS AYSMIWVRQA PGKGLEWVSY IRPSGGRTTY | 60 |
| ADSVKGRFTI SRDNSKNTLY LQMNSLRAED TAVYYCARGG LLLWFRWLKS NYFDYWGQGT | 120 |
| LVTVSSASTK GPSVFPLAPS SKS | 143 |
| X69-H10 LC | |
| QDIQMTQSPS SLSAFVGDRV TITCRASQPI DNYLNWYHQK PGKAPKLLIY AASRLQSGVP | 60 |
| SRLSGSGFGT DFTLTISSLQ PEDFGNYYCQ QSYTVPYTFG GGTKVEIR | 108 |
| X69-H10 HC | |
| EVQLLESGGG LVQPGGSLRL SCAASGFTFS AYSMIWVRQA PGKGLEWVSY IRPSGGRTTY | 60 |
| ADSVKGRFTI SRDNSKNTLY LQMNSLRAED TAVYYCARGG LLLWFRYLKS NYFDYWGQGT | 120 |
| LVTVSSASTK GPSVFPLAPS SKS | 143 |
| X66-F01 LC | |
| QDIQMTQSPS SLSAFVGDRV TITCRASQPI DNYLNWYHQK PGKAPKLLIY AASRLQSGVP | 60 |
| SRLSGSGFGT DFTLTISSLQ PEDFGNYYCQ QSYTVPYTFG GGTKVEIR | 108 |
| X66-F01 HC | |
| EVQLLESGGG LVQPGGSLRL SCAASGFTFS AYSMIWVRQA PGKGLEWVSY IRPSGGRTTY | 60 |
| ADSVKGRFTI SRDNSKNTLY LQMNSLRAED TAVYYCARGG LLLWFSELKS NYFDYWGQGT | 120 |
| LVTVSSASTK GPSVFPLAPS SKS | 143 |
| X66-H11 LC | |
| QDIQMTQSPS SLSAFVGDRV TITCRASQPI DNYLNWYHQK PGKAPKLLIY AASRLQSGVP | 60 |
| SRLSGSGFGT DFTLTISSLQ PEDFGNYYCQ QSYTVPYTFG GGTKVEIR | 108 |
| X66-H11 HC | |
| EVQLLESGGG LVQPGGSLRL SCAASGFTFS AYSMIWVRQA PGKGLEWVSY IRPSGGRTTY | 60 |
| ADSVKGRFTI SRDNSKNTLY LQMNSLRAED TAVYYCARGG LLLWFTELKS NYFDYWGQGT | 120 |
| LVTVSSASTK GPSVFPLAPS SKS | 143 |
| X66-C02 LC | |
| QDIQMTQSPS SLSAFVGDRV TITCRASQPI DNYLNWYHQK PGKAPKLLIY AASRLQSGVP | 60 |
| SRLSGSGFGT DFTLTISSLQ PEDFGNYYCQ QSYTVPYTFG GGTKVEIR | 108 |
| X66-C02 HC | |
| EVQLLESGGG LVQPGGSLRL SCAASGFTFS AYSMIWVRQA PGKGLEWVSY IRPSGGRTTY | 60 |
| ADSVKGRFTI SRDNSKNTLY LQMNSLRAED TAVYYCARGG LLLWFVELKS NYFDYWGQGT | 120 |
| LVTVSSASTK GPSVFPLAPS SKS | 143 |
| X66-F09 LC | |
| QDIQMTQSPS SLSAFVGDRV TITCRASQPI DNYLNWYHQK PGKAPKLLIY AASRLQSGVP | 60 |
| SRLSGSGFGT DFTLTISSLQ PEDFGNYYCQ QSYTVPYTFG GGTKVEIR | 108 |
| X66-F09 HC | |
| EVQLLESGGG LVQPGGSLRL SCAASGFTFS AYSMIWVRQA PGKGLEWVSY IRPSGGRTTY | 60 |
| ADSVKGRFTI SRDNSKNTLY LQMNSLRAED TAVYYCARGG LLLWFWELKS NYFDYWGQGT | 120 |
| LVTVSSASTK GPSVFPLAPS SKS | 143 |
| X66-G08 LC | |
| QDIQMTQSPS SLSAFVGDRV TITCRASQPI DNYLNWYHQK PGKAPKLLIY AASRLQSGVP | 60 |
| SRLSGSGFGT DFTLTISSLQ PEDFGNYYCQ QSYTVPYTFG GGTKVEIR | 108 |
| X66-G08 HC | |
| EVQLLESGGG LVQPGGSLRL SCAASGFTFS AYSMIWVRQA PGKGLEWVSY IRPSGGRTTY | 60 |
| ADSVKGRFTI SRDNSKNTLY LQMNSLRAED TAVYYCARGG LLLWFYELKS NYFDYWGQGT | 120 |
| LVTVSSASTK GPSVFPLAPS SKS | 143 |
| X67-C09 LC | |
| QDIQMTQSPS SLSAFVGDRV TITCRASQPI DNYLNWYHQK PGKAPKLLIY AASRLQSGVP | 60 |
| SRLSGSGFGT DFTLTISSLQ PEDFGNYYCQ QSYTVPYTFG GGTKVEIR | 108 |
| X67-C09 HC | |
| EVQLLESGGG LVQPGGSLRL SCAASGFTFS AYSMIWVRQA PGKGLEWVSY IRPSGGRTTY | 60 |
| ADSVKGRFTI SRDNSKNTLY LQMNSLRAED TAVYYCARGG LLLWGRELKS NYFDYWGQGT | 120 |
| LVTVSSASTK GPSVFPLAPS SKS | 143 |
| X67-B04 LC | |
| QDIQMTQSPS SLSAFVGDRV TITCRASQPI DNYLNWYHQK PGKAPKLLIY AASRLQSGVP | 60 |
| SRLSGSGFGT DFTLTISSLQ PEDFGNYYCQ QSYTVPYTFG GGTKVEIR | 108 |
| X67-B04 HC | |
| EVQLLESGGG LVQPGGSLRL SCAASGFTFS AYSMIWVRQA PGKGLEWVSY IRPSGGRTTY | 60 |
| ADSVKGRFTI SRDNSKNTLY LQMNSLRAED TAVYYCARGG LLLWKRELKS NYFDYWGQGT | 120 |
| LVTVSSASTK GPSVFPLAPS SKS | 143 |
| X67-G09 LC | |
| QDIQMTQSPS SLSAFVGDRV TITCRASQPI DNYLNWYHQK PGKAPKLLIY AASRLQSGVP | 60 |
| SRLSGSGFGT DFTLTISSLQ PEDFGNYYCQ QSYTVPYTFG GGTKVEIR | 108 |
| X67-G09 HC | |
| EVQLLESGGG LVQPGGSLRL SCAASGFTFS AYSMIWVRQA PGKGLEWVSY IRPSGGRTTY | 60 |
| ADSVKGRFTI SRDNSKNTLY LQMNSLRAED TAVYYCARGG LLLWLRELKS NYFDYWGQGT | 120 |
| LVTVSSASTK GPSVFPLAPS SKS | 143 |
| X67-C03 LC | |
| QDIQMTQSPS SLSAFVGDRV TITCRASQPI DNYLNWYHQK PGKAPKLLIY AASRLQSGVP | 60 |
| SRLSGSGFGT DFTLTISSLQ PEDFGNYYCQ QSYTVPYTFG GGTKVEIR | 108 |
| X67-C03 HC | |
| EVQLLESGGG LVQPGGSLRL SCAASGFTFS AYSMIWVRQA PGKGLEWVSY IRPSGGRTTY | 60 |
| ADSVKGRFTI SRDNSKNTLY LQMNSLRAED TAVYYCARGG LLLWMRELKS NYFDYWGQGT | 120 |
| LVTVSSASTK GPSVFPLAPS SKS | 143 |
| X67-D03 LC | |
| QDIQMTQSPS SLSAFVGDRV TITCRASQPI DNYLNWYHQK PGKAPKLLIY AASRLQSGVP | 60 |
| SRLSGSGFGT DFTLTISSLQ PEDFGNYYCQ QSYTVPYTFG GGTKVEIR | 108 |
| X67-D03 HC | |
| EVQLLESGGG LVQPGGSLRL SCAASGFTFS AYSMIWVRQA PGKGLEWVSY IRPSGGRTTY | 60 |
| ADSVKGRFTI SRDNSKNTLY LQMNSLRAED TAVYYCARGG LLLWNRELKS NYFDYWGQGT | 120 |
| LVTVSSASTK GPSVFPLAPS SKS | 143 |
| X67-B05 LC | |
| QDIQMTQSPS SLSAFVGDRV TITCRASQPI DNYLNWYHQK PGKAPKLLIY AASRLQSGVP | 60 |
| SRLSGSGFGT DFTLTISSLQ PEDFGNYYCQ QSYTVPYTFG GGTKVEIR | 108 |
| X67-B05 HC | |
| EVQLLESGGG LVQPGGSLRL SCAASGFTFS AYSMIWVRQA PGKGLEWVSY IRPSGGRTTY | 60 |
| ADSVKGRFTI SRDNSKNTLY LQMNSLRAED TAVYYCARGG LLLWPRELKS NYFDYWGQGT | 120 |
| LVTVSSASTK GPSVFPLAPS SKS | 143 |
| X67-F01 LC | |
| QDIQMTQSPS SLSAFVGDRV TITCRASQPI DNYLNWYHQK PGKAPKLLIY AASRLQSGVP | 60 |
| SRLSGSGFGT DFTLTISSLQ PEDFGNYYCQ QSYTVPYTFG GGTKVEIR | 108 |
| X67-F01 HC | |
| EVQLLESGGG LVQPGGSLRL SCAASGFTFS AYSMIWVRQA PGKGLEWVSY IRPSGGRTTY | 60 |
| ADSVKGRFTI SRDNSKNTLY LQMNSLRAED TAVYYCARGG LLLWQRELKS NYFDYWGQGT | 120 |
| LVTVSSASTK GPSVFPLAPS SKS | 143 |
| X67-G05 LC | |
| QDIQMTQSPS SLSAFVGDRV TITCRASQPI DNYLNWYHQK PGKAPKLLIY AASRLQSGVP | 60 |
| SRLSGSGFGT DFTLTISSLQ PEDFGNYYCQ QSYTVPYTFG GGTKVEIR | 108 |
| X67-G05 HC | |
| EVQLLESGGG LVQPGGSLRL SCAASGFTFS AYSMIWVRQA PGKGLEWVSY IRPSGGRTTY | 60 |
| ADSVKGRFTI SRDNSKNTLY LQMNSLRAED TAVYYCARGG LLLWRRELKS NYFDYWGQGT | 120 |
| LVTVSSASTK GPSVFPLAPS SKS | 143 |
| X67-B03 LC | |
| QDIQMTQSPS SLSAFVGDRV TITCRASQPI DNYLNWYHQK PGKAPKLLIY AASRLQSGVP | 60 |
| SRLSGSGFGT DFTLTISSLQ PEDFGNYYCQ QSYTVPYTFG GGTKVEIR | 108 |
| X67-B03 HC | |
| EVQLLESGGG LVQPGGSLRL SCAASGFTFS AYSMIWVRQA PGKGLEWVSY IRPSGGRTTY | 60 |
| ADSVKGRFTI SRDNSKNTLY LQMNSLRAED TAVYYCARGG LLLWSRELKS NYFDYWGQGT | 120 |
| LVTVSSASTK GPSVFPLAPS SKS | 143 |
| X67-F10 LC | |
| QDIQMTQSPS SLSAFVGDRV TITCRASQPI DNYLNWYHQK PGKAPKLLIY AASRLQSGVP | 60 |
| SRLSGSGFGT DFTLTISSLQ PEDFGNYYCQ QSYTVPYTFG GGTKVEIR | 108 |
| X67-F10 HC | |
| EVQLLESGGG LVQPGGSLRL SCAASGFTFS AYSMIWVRQA PGKGLEWVSY IRPSGGRTTY | 60 |
| ADSVKGRFTI SRDNSKNTLY LQMNSLRAED TAVYYCARGG LLLWTRELKS NYFDYWGQGT | 120 |
| LVTVSSASTK GPSVFPLAPS SKS | 143 |
| X67-H01 LC | |
| QDIQMTQSPS SLSAFVGDRV TITCRASQPI DNYLNWYHQK PGKAPKLLIY AASRLQSGVP | 60 |
| SRLSGSGFGT DFTLTISSLQ PEDFGNYYCQ QSYTVPYTFG GGTKVEIR | 108 |
| X67-H01 HC | |
| EVQLLESGGG LVQPGGSLRL SCAASGFTFS AYSMIWVRQA PGKGLEWVSY IRPSGGRTTY | 60 |
| ADSVKGRFTI SRDNSKNTLY LQMNSLRAED TAVYYCARGG LLLWWRELKS NYFDYWGQGT | 120 |
| LVTVSSASTK GPSVFPLAPS SKS | 143 |
| X67-F08 LC | |
| QDIQMTQSPS SLSAFVGDRV TITCRASQPI DNYLNWYHQK PGKAPKLLIY AASRLQSGVP | 60 |
| SRLSGSGFGT DFTLTISSLQ PEDFGNYYCQ QSYTVPYTFG GGTKVEIR | 108 |
| X67-F08 HC | |
| EVQLLESGGG LVQPGGSLRL SCAASGFTFS AYSMIWVRQA PGKGLEWVSY IRPSGGRTTY | 60 |
| ADSVKGRFTI SRDNSKNTLY LQMNSLRAED TAVYYCARGG LLLWYRELKS NYFDYWGQGT | 120 |
| LVTVSSASTK GPSVFPLAPS SKS | 143 |

TABLE 6

CDR Amino Acid Sequences of Optimized Antibody Inhibitor of pKal Based
on M142-H08

| | | | | | | | |
|---|---|---|---|---|---|---|---|
| | Ki, app | | | | | | |
| Initial | (nM) of | | | | HV- | | |
| Name | IgG | LV-CDR1 | LV-CDR2 | LV-CDR3 | CDR1 | HV-CDR2 | HV-CDR3^{a} |

| | | | | | | | |
|---|---|---|---|---|---|---|---|
| X67-D03 | 0.1 | RASQPIDNYLN | AASRLQS | QQSYTVPYT | AYSMI | YIRPSGGRTTYADSVKG | GGLLLWNRELKSNYFDY |
| X67-G04 | 0.35 | RASQPIDNYLN | AASRLQS | QQSYTVPYT | AYSMI | YIRPSGGRTTYADSVKG | GGLLLWARELKSNYFDY |

^{a}The F to N substitution (in bold) in the CDR3 of the M142-H08 gives X67-D03, an IgG that is not cleaved during expression and is a potent inhibitor of human. Similarly, the F to A substitution gives X67-G04, which is also not cleaved.

TABLE 7

CDR Amino Acid Sequences of Affinity Matured Antibody Inhibitors of pKal Discovered
using ROLIC

| Initial | Ki, app | | | | HV- | | |
|---|---|---|---|---|---|---|---|
| Name | (nM) | LV-CDR1 | LV-CDR2 | LV-CDR3 | CDR1 | HV-CDR2 | HV-CDR3 |
| X59-C07 | 6.1 | RAGRSISTYVN | AASSLQS | QQSQSTPYT | HYLMT | YISPSGGHTIYADSVKG | VARGIAARSRTSYFDY |
| X60-D01 | 2.0 | RASQIVSSRYLA | GAASRAT | QQTYSSPFT | HYLMT | YISPSGGHTIYADSVKG | VARGIAARSRTSYFDY |
| X63-G10 | 9.0 | RASQSISNYLN | AASSLQS | QQSYTSPYT | HYLMT | YISPSGGHTIYADSVKG | VARGIAARSRTSYFDY |
| X64-F04 | 1.9 | RASQIVSSNYLA | GASNRAT | QQSFNIPYT | HYLMT | YISPSGGHTIYADSVKG | VARGIAARSRTSYFDY |
| X63-G06 | 0.4 (Fab) | RTSQFVNSNYLA | GASSRAT | QQSSRTPWT | HYLMT | YISPSGGHTIYADSVKG | VARGIAARSRTSYFDY |
| X81-B01^{a} | 0.2 (IgG) | RTSQFVNSNYLA | GASSRAT | QQSSRTPWT | HYLMT | YISPSGGHTIYADSVKG | VARGIAARSRTSYFDY |

^{a}X81-B01 is the codon optimized and germlined version of X63-G06 as a full length human IgG produced in HEK 293T cells.

[0868] Amino acid sequences of light chain (LC) and heavy chain (HC) variable domain of affinity matured antibody inhibitors of pKal discovered using ROLIC are shown below.

| | |
|---|---|
| X59-C07 LC | |
| QDIQMTQSPS SLSASVGDRV TVTCRAGRSI STYVNWYQQK PGKAPKLLIY AASSLQSGVP | 60 |
| SRFSGSRSGT DFTLTISSLQ PEDFATYYCQ QSQSTPYTFG QGTKLEVK | 108 |
| X59-C07 HC | |
| EVQLLESGGG LVQPGGSLRL SCAASGFTFS HYLMTWVRQA PGKGLEWVSY ISPSGGHTIY | 60 |
| ADSVKGRFTI SRDNSKNTLY LQMNSLRAED TAVYYCARVA RGIAARSRTS YFDYWGQGTL | 120 |
| VTVSSASTKG PSVFPLAPSS KS | 142 |
| X60-D01 LC | |
| QDIQMTQSPG TLSLSPGERA TLSCRASQIV SSRYLAWYQQ RPGQAPRLLI YGAASRATGI | 60 |
| PDRFSGSGSG TDFTLTISSL QAEDFATYYC QQTYSSPFTF GQGTKMEIK | 109 |
| X60-D01 HC | |
| EVQLLESGGG LVQPGGSLRL SCAASGFTFS HYLMTWVRQA PGKGLEWVSY ISPSGGHTIY | 60 |
| ADSVKGRFTI SRDNSKNTLY LQMNSLRAED TAVYYCARVA RGIAARSRTS YFDYWGQGTL | 120 |
| VTVSSASTKG PSVFPLAPSS KS | 142 |
| X63-G06 LC | |
| QDIQMTQSPG TLSLSPGERA TLSCRTSQFV NSNYLAWYQQ TPGQAPRLLI YGASSRATGI | 60 |
| PDRFSGTGYG TDFTLTISRL EPEDYGTYYC QQSSRTPWTF GQGTRVEIK | 109 |
| X63-G06 HC | |
| EVQLLESGGG LVQPGGSLRL SCAASGFTFS HYLMTWVRQA PGKGLEWVSY ISPSGGHTIY | 60 |
| ADSVKGRFTI SRDNSKNTLY LQMNSLRAED TAVYYCARVA RGIAARSRTS YFDYWGQGTL | 120 |
| VTVSSASTKG PSVFPLAPSS KS | 142 |
| X63-G10 LC | |
| QDIQMTQSPD SLSASVGDRV TITCRASQSI SNYLNWYQQK PGKAPKLLIY AASSLQSGVP | 60 |
| SRFSGSGSGT DFTLTISGLQ PEDFASYYCQ QSYTSPYTFV QGTKLEIKRT | 110 |
| X63-G10 HC | |
| EVQLLESGGG LVQPGGSLRL SCAASGFTFS HYLMTWVRQA PGKGLEWVSY ISPSGGHTIY | 60 |
| ADSVKGRFTI SRDNSKNTLY LQMNSLRAED TAVYYCARVA RGIAARSRTS YFDYWGQGTL | 120 |
| VTVSSASTKG PSVFPLAPSS KS | 142 |
| X64-F04 LC | |
| QDIQMTQSPA TLSLSPGERA TLSCRASQIV SSNYLAWYQQ KPGQAPRLLI YGASNRATGI | 60 |
| PDRFSGSGSG TEFTLTISSL QSEDFAIYYC QQSFNIPYTF GQGTRVDIK | 109 |
| X64-F04 HC | |
| EVQLLESGGG LVQPGGSLRL SCAASGFTFS HYLMTWVRQA PGKGLEWVSY ISPSGGHTIY | 60 |
| ADSVKGRFTI SRDNSKNTLY LQMNSLRAED TAVYYCARVA RGIAARSRTS YFDYWGQGTL | 120 |
| VTVSSASTKG PSVFPLAPSS KS | 142 |
| X81-B01 is the germlined IgG produced in HEK 293T cells version | |
| of the X63-G06 Fab, as indicated above. | |
| X101-A01 (aka DX-2922) is the germlined IgG produced in CHO cells | |
| version of the X63-G06 Fab | |

### Example 4

### Affinity Maturation

[0869] In addition to optimizing the sequence of the clipped antibody (M142-H08), we also performed affinity maturation on two of the antibodies identified by phage display (M162-A04 and M160-G12). Both of these antibodies inhibit human pKal with single digit nanomolar potency, appear specific to pKal, and do not bind prekallikrein (Table 3). We first performed a novel form of light chain shuffling called ROLIC (Rapid Optimization of Light Chains) on M162-A04 and M160-G12 (see, e.g., WO 2009/102927 and U.S. 2009-0215119). From the screening of the antibodies discovered by ROLIC we identified one antibody with subnamolar potency (X63-G06) that shared the same heavy chain as M160-G12. We then constructed HV-CDR3 spiking affinity maturation libraries based on CDR3 sequences in M162-A04 and X63-G06 (described below).

[0870] Affinity Maturation by ROLIC. We used ROLIC to affinity mature the two leads from Table 3 that were not cleaved (M162-A04 and M160-G12). This process identified one antibody that inhibits pKal with a subnanomolar K_{i,app} (Table 7). X63-G06 inhibits pKal with a K_{i,app} of approximately 0.4 nM as a Fab fragment. When this antibody was converted to an IgG that is germlined and sequenced optimized for CHO cell expression (X81-B01) it was found to inhibit pKal with a K_{i,app} of approximately 0.2 nM.

### Example 5

### Affinity Maturation of Heavy Chain CDR1/2 and CDR3

[0871] We used two additional affinity maturation strategies to identify highly potent antibodies based on two different parental antibody inhibitor leads: M162-A04 and X63-G06. One approach was to generate libraries that shuffled the CDR1/2 of the HC of two different parental antibody inhibitor leads (M162-A04 and X63-G06) against additional CDR1/2 diversity. Another approach was to create heavy chain CDR3 spiking libraries based on these leads.

[0872] The 82 antibodies that were discovered based on improvements in M162-A04 due to modifications in either the CDR1/2 and CDR3 region are shown in Table 8. Inhibition screening with 10 nM antibody (as Fab fragments) revealed that there were 33 antibodies that inhibited pKal activity by over 90%. Several antibodies were shown to be subnanomolar inhibitors of human pKal.

[0873] The 62 antibodies that were discovered based on improvements in X63-G06 due to modifications in either the CDR1/2 and CDR3 region are shown in Table 9. Inhibition screening with 10 nM antibody (as Fab fragments) revealed that there were 24 antibodies that inhibited pKal activity by over 90%. Several antibodies were shown to be subnanomolar inhibitors of human pKal.

TABLE 8

Sequences of Antibodies Obtained from CDR1/2 and CDR3 Spiking Affinity Maturation Libraries
Based on M162-A04

| | | | | | | | | |
|---|---|---|---|---|---|---|---|---|
| | | human pKal | | | | | | |
| | % inhibition | Ki, app | | | | HV- | | |
| Antibody I.D. | at 10 nM | (nM) | LV-CDR1 | LV-CDR2 | LV-CDR3 | CDR1 | HV-CDR2 | HV-CDR3 |

| | | | | | | | | |
|---|---|---|---|---|---|---|---|---|
| M202-A12 | 97.5 | 0.2 | RASQSISSWLA | KASTLES | QQYNTYWT | HYIMM | GIYSSGGITVYADSVKG | QRTGVPRRDSFNI |
| M196-C06 | 97.2 | 0.1 | RASQSISSWLA | KASTLES | QQYNTYWT | IYSMH | SIYPSRGMTWYADSVKG | RRTGIPRRDAFDI |
| M198-F09 | 96.9 | 0.2 | RASQSISSWLA | KASTLES | QQYNTYWT | VYNMH | SIYPSGGMTYYADSVKG | RRTGIPRRDAFDI |
| M199-A08 | 96.4 | 0.06 | RASQSISSWLA | KASTLES | QQYNTYWT | HYIMM | GIYSSGGITVYADSVKG | RRIGVPRRDEFDI |
| M202-C01 | 96.3 | 0.1 | RASQSISSWLA | KASTLES | QQYNTYWT | HYIMM | GIYSSGGITVYADSVKG | RRTGVPRWDDFDI |
| M198-A06 | 96.1 | 0.4 | RASQSISSWLA | KASTLES | QQYNTYWT | IYSMH | SIYSSGGPTKYADSVKG | RRTGIPRRDAFDI |
| M200-D03 | 95.9 | 0.1 | RASQSISSWLA | KASTLES | QQYNTYWT | HYIMM | GIYSSGGITVYADSVKG | RRIGVPRRDSFDM |
| M202-H03 | 95.7 | 0.1 | RASQSISSWLA | KASTLES | QQYNTYWT | HYIMM | GIYSSGGITVYADSVKG | RRTGVPRWDDFDI |
| M201-A07 | 95.7 | 0.1 | RASQSISSWLA | KASTLES | QQYNTYWT | HYIMM | GIYSSGGITVYADSVKG | RRTGVPRRDEFDI |
| M197-A01 | 95.3 | | RASQSISSWLA | KASTLES | QQYNTYWT | IYDMI | SIYPSGGNTSYADSVKG | RRTGIPRRDAFDI |
| M202-D09 | 95.0 | 0.4 | RASQSISSWLA | KASTLES | QQYNTYWT | HYIMM | GIYSSGGITVYADSVKG | RRIGVPRRDSFDI |
| M197-A09 | 94.9 | 0.6 | RASQSISSWLA | KASTLES | QQYNTYWT | VYNMH | SIYPSGGMTTYADSVKG | RRTGIPRRDAFDI |
| M198-G07 | 94.9 | | RASQSISSWLA | KASTLES | QQYNTYWT | IYDMT | SIYPSGGQTIYADSVKG | RRTGIPRRDAFDI |
| M200-A10 | 94.3 | 0.3 | RASQSISSWLA | KASTLES | QQYNTYWT | HYIMM | GIYSSGGITVYADSVKG | RRTGVPRRDSFDI |
| M197-H10 | 94.1 | | RASQSISSWLA | KASTLES | QQYNTYWT | SYNMH | SIVPSGGKTNYADSVKG | RRTGIPRRDAFDI |
| M196-D12 | 94.1 | 0.2 | RASQSISSWLA | KASTLES | QQYNTYWT | RYSMR | VIYPSGGQTYYADSVKG | RRTGIPRRDAFDI |
| M197-A08 | 93.7 | | RASQSISSWLA | KASTLES | QQYNTYWT | IYSMQ | SIGSSGGKTLYADSVKG | RRTGIPRRDAFDI |
| M198-B09 | 93.5 | | RASQSISSWLA | KASTLES | QQYNTYWT | VYSMT | SIGSSGGSTTYADSVKG | RRTGIPRRDAFDI |
| M198-E09 | 93.1 | | RASQSISSWLA | KASTLES | QQYNTYWT | IYDMN | SIYPSGGRTRYADSVKG | RRTGIPRRDAFDI |
| M202-B03 | 93.1 | 0.3 | RASQSISSWLA | KASTLES | QQYNTYWT | HYIMM | GIYSSGGITVYADSVKG | RRTGVPRRDDFDI |
| M198-C10 | 93.0 | | RASQSISSWLA | KASTLES | QQYNTYWT | HYMGMN | SIVPSGGWTQYADSVKG | RRTGIPRRDAFDI |
| M197-E12 | 93.0 | | RASQSISSWLA | KASTLES | QQYNTYWT | TYTMR | SIYPSGGKTQYADSVKG | RRTGIPRRDAFDI |
| M198-F04 | 92.9 | | RASQSISSWLA | KASTLES | QQYNTYWT | IYDMW | SIRPSGGITKYADSVKG | RRTGIPRRDAFDI |
| M197-H11 | 92.9 | | RASQSISSWLA | KASTLES | QQYNTYWT | IYNMI | SIYPSGGWTTYADSVKG | RRTGIPRRDAFDI |
| M197-F01 | 92.6 | | RASQSISSWLA | KASTLES | QQYNTYWT | IYHMY | SIGPSGGPTGYADSVKG | RRTGIPRRDAFDI |
| M198-E11 | 92.5 | | RASQSISSWLA | KASTLES | QQYNTYWT | TYSMY | SIYPSGGLTWYADSVKG | RRTGIPRRDAFDI |
| M202-C09 | 92.3 | 0.3 | RASQSISSWLA | KASTLES | QQYNTYWT | HYIMM | GIYSSGGITVYADSVKG | RRIGVPRRDDFDI |
| M198-H08 | 92.3 | | RASQSISSWLA | KASTLES | QQYNTYWT | IYDMY | SIGPSGGPTAYADSVKG | RRTGIPRRDAFDI |
| M198-F08 | 91.8 | | RASQSISSWLA | KASTLES | QQYNTYWT | VYSMW | SISSSGGMTEYADSVKG | RRTGIPRRDAFDI |
| M202-E06 | 91.5 | | RASQSISSWLA | KASTLES | QQYNTYWT | HYIMM | GIYSSGGITVYADSVKG | RRRGVPRRDDFDI |
| M195-D12 | 90.8 | | RASQSISSWLA | KASTLES | QQYNTYWT | IYGMF | GIGPSGGPTKYADSVKG | RRTGIPRRDAFDI |
| M197-F03 | 90.7 | | RASQSISSWLA | KASTLES | QQYNTYWT | IYSMF | SIGPSGGVTHYADSVKG | RRTGIPRRDAFDI |
| M198-E02 | 90.3 | | RASQSISSWLA | KASTLES | QQYNTYWT | IYSMY | YIRPSGGNTKYADSVKG | RRTGIPRRDAFDI |
| M198-A02 | 89.1 | | RASQSISSWLA | KASTLES | QQYNTYWT | RYSMI | SIWSSGGATEYADSVKG | RRTGIPRRDAFDI |
| M202-A01 | 88.9 | | RASQSISSWLA | KASTLES | QQYNTYWT | HYIMM | GIYSSGGITVYADSVKG | RRIGVPRRDAFDI |
| M202-G03 | 88.3 | | RASQSISSWLA | KASTLES | QQYNTYWT | HYIMM | GIYSSGGITVYADSVKG | RRTGVPRRDSFEI |
| M195-B12 | 87.7 | | RASQSISSWLA | KASTLES | QQYNTYWT | KYWMY | YIRPSGGQTYYADSVKG | RRTGIPRRDAFDI |
| M198-A07 | 86.1 | | RASQSISSWLA | KASTLES | QQYNTYWT | RYQMH | WISPSGGITGYADSVKG | RRTGIPRRDAFDI |
| M198-H02 | 85.8 | | RASQSISSWLA | KASTLES | QQYNTYWT | PYNMY | WIVPGGVTKYADSVKG | RRTGIPRRDAFDI |
| M200-H07 | 85.4 | | RASQSISSWLA | KASTLES | QQYNTYWT | HYIMM | GIYSSGGITVYADSVKG | RRTGVPRRNAFDN |
| M201-H06 | 84.6 | | RASQSISSWLA | KASTLES | QQYNTYWT | HYIMM | GIYSSGGITVYADSVKG | RRTGVPRRDAFDI |
| M202-F06 | 84.2 | | RASQSISSWLA | KASTLES | QQYNTYWT | HYIMM | GIYSSGGITVYADSVKG | RRTGVPRWDAFDI |
| M195-C12 | 84.2 | | RASQSISSWLA | KASTLES | QQYNTYWT | MYQMF | SISPGGGTQYADSVKG | RRTGIPRRDAFDI |
| M202-H05 | 84.0 | | RASQSISSWLA | KASTLES | QQYNTYWT | HYIMM | GIYSSGGITVYADSVKG | RRTGVPRRDVFDI |
| M198-C05 | 83.9 | | RASQSISSWLA | KASTLES | QQYNTYWT | RYKMY | VIGPSGGATFYADSVKG | RRTGIPRRDAFDI |
| M196-H03 | 83.9 | | RASQSISSWLA | KASTLES | QQYNTYWT | RYVMW | SISPSGDTHYADSVKG | RRTGIPRRDAFDI |
| M200-E11 | 83.2 | | RASQSISSWLA | KASTLES | QQYNTYWT | HYIMM | GIYSSGGITVYADSVKG | RRTGVPRRDAFDN |
| M202-B04 | 81.9 | | RASQSISSWLA | KASTLES | QQYNTYWT | HYIMM | GIYSSGGITVYADSVKG | RRSGVPRRDDFDI |
| M202-A04 | 81.2 | | RASQSISSWLA | KASTLES | QQYNTYWT | HYIMM | GIYSSGGITVYADSVKG | RRKGIPRRDDFDI |
| M198-B12 | 80.7 | | RASQSISSWLA | KASTLES | QQYNTYWT | KYSMA | GIYPSGGRTLYADSVKG | RRTGIPRRDAFDI |
| M198-A09 | 77.3 | | RASQSISSWLA | KASTLES | QQYNTYWT | IYFMS | SIRSSGGPTWYADSVKG | RRTGIPRRDAFDI |
| M198-C06 | 76.5 | | RASQSISSWLA | KASTLES | QQYNTYWT | QYFMH | YIYPSGGMTEYADSVKG | RRTGIPRRDAFDI |
| M198-C09 | 75.4 | | RASQSISSWLA | KASTLES | QQYNTYWT | IYTMY | SISPSGGWTYYADSVKG | RRTGIPRRDAFDI |
| M195-B02 | 75.1 | | RASQSISSWLA | KASTLES | QQYNTYWT | PYLMW | YIGPSGGPTHYADSVKG | RRTGIPRRDAFDI |
| M198-F12 | 74.6 | | RASQSISSWLA | KASTLES | QQYNTYWT | IYTMM | SIWSSGGQTKYADSVKG | RRTGIPRRDAFDI |
| M201-H08 | 74.5 | | RASQSISSWLA | KASTLES | QQYNTYWT | HYIMM | GIYSSGGITVYADSVKG | RRTGVPRRDALDN |
| M202-C02 | 74.3 | | RASQSISSWLA | KASTLES | QQYNTYWT | HYIMM | GIYSSGGITVYADSVKG | RRPGVPRRDAFDI |
| M198-C03 | 72.4 | | RASQSISSWLA | KASTLES | QQYNTYWT | RYSMS | GISPSGGETSYADSVKG | RRTGIPRRDAFDI |
| M198-A08 | 72.3 | | RASQSISSWLA | KASTLES | QQYNTYWT | WYMMQ | RISPSGGTTYADSVKG | RRTGIPRRDAFDI |
| M195-A02 | 71.3 | | RASQSISSWLA | KASTLES | QQYNTYWT | QYMMM | GISSSGGHTDYADSVKG | RRTGIPRRDAFDI |
| M197-G10 | 67.6 | | RASQSISSWLA | KASTLES | QQYNTYWT | VYAMR | SIYPSGGKTWYADSVKG | RRTGIPRRDAFDI |
| M195-G02 | 67.5 | | RASQSISSWLA | KASTLES | QQYNTYWT | PYNMM | SIWPSGGTTDYADSVKG | RRTGIPRRDAFDI |
| M196-D02 | 66.2 | | RASQSISSWLA | KASTLES | QQYNTYWT | VYSMH | VIGPSGGITLYADSVKG | RRTGIPRRDAFDI |
| M199-A11 | 65.4 | | RASQSISSWLA | KASTLES | QQYNTYWT | HYIMM | GIYSSGGITVYADSVKG | RRRGIPRRDAFDI |
| M200-F01 | 65.1 | | RASQSISSWLA | KASTLES | QQYNTYWT | HYIMM | GIYSSGGITVYADSVKG | RRMGIPRRNAFDI |
| M198-D12 | 63.5 | 0.7 | RASQSISSWLA | KASTLES | QQYNTYWT | LYVMY | YIVPSGGPTAYADSVKG | RRTGIPRRDAFDI |
| M197-C12 | 56.4 | | RASQSISSWLA | KASTLES | QQYNTYWT | PYDML | YIVSSGGLTKYADSVKG | RRTGIPRRDAFDI |
| M198-G03 | 53.8 | | RASQSISSWLA | KASTLES | QQYNTYWT | QYTMV | WIYSSRANYADSVKG | RRTGIPRRDAFDI |
| M199-B01 | 53.4 | | RASQSISSWLA | KASTLES | QQYNTYWT | HYIMM | GIYSSGGITVYADSVKG | RRTGIPRRDAFDN |
| M202-A08 | 52.9 | | RASQSISSWLA | KASTLES | QQYNTYWT | HYIMM | GIYSSGGITVYADSVKG | RRTGIPRWDAFDI |
| M195-A12 | 51.7 | | RASQSISSWLA | KASTLES | QQYNTYWT | PYMMM | GIYPSGGYTVYADSVKG | RRTGIPRRDAFDI |
| M202-E03 | 51.4 | | RASQSISSWLA | KASTLES | QQYNTYWT | HYIMM | GIYSSGGITVYADSVKG | RRTGIPRRDAFEI |
| M196-G12 | 51.1 | | RASQSISSWLA | KASTLES | QQYNTYWT | NYSMD | RIYSSGGGTIYADSVKG | RRTGIPRRDAFDI |
| M195-F12 | 45.5 | | RASQSISSWLA | KASTLES | QQYNTYWT | HYVMM | YIVPSGGVTAYADSVKG | RRTGIPRRDAFDI |
| M200-B01 | 42.6 | | RASQSISSWLA | KASTLES | QQYNTYWT | HYIMM | GIYSSGGITVYADSVKG | RRTGIPRRDAFDS |
| M198-H09 | 41.1 | | RASQSISSWLA | KASTLES | QQYNTYWT | IYLMI | YIGPSGGPTEYADSVKG | RRTGIPRRDAFDI |
| M195-E12 | 38.0 | | RASQSISSWLA | KASTLES | QQYNTYWT | YYIMF | YISPSGGYTHYADSVKG | RRTGIPRRDAFDI |
| M201-A06 | 36.8 | | RASQSISSWLA | KASTLES | QQYNTYWT | HYIMM | GIYSSGGITVYADSVKG | RRTGIPRRDVFDI |
| M202-A10 | 36.3 | | RASQSISSWLA | KASTLES | QQYNTYWT | HYIMM | GIYSSGGITVYADSVKG | RRTGIPRRDSFDI |
| M197-G11 | 19.2 | | RASQSISSWLA | KASTLES | QQYNTYWT | TYAMV | SIYPSGGITTYADSVKG | RRTGIPRRDAFDI |
| M201-F11 | 15.7 | | RASQSISSWLA | KASTLES | QQYNTYWT | HYIMM | GIYSSGGITVYADSVKG | RRSGIPRRDAFDI |
| M198-A01 | 13.8 | | RASQSISSWLA | KASTLES | QQYNTYWT | PYTMI | SISSSGGMTPYADSVKG | RRTGIPRRDAFDI |

[0874] Amino acid sequences of light chain (LC) and heavy chain (HC) variable domain of pKal antibodies obtained from CDR1/2 and CDR3 spiking affinity maturation libraries based on M162-A04.

| M195-A02 LC | |
|---|---|
| QDIQMTQSPS TLSASVGDRV TITCRASQSI SSWLAWYQQK PGKAPNLLIY KASTLESGVP | 60 |
| SRFSGSGSGT EFTLTISSLQ PDDFATYYCQ QYNTYWTFGQ GTKVEIK | 107 |
| M195-A02 HC | |
| EVQLLESGGG LVQPGGSLRL SCAASGFTFS QYMMMWVRQA PGKGLEWVSG ISSSGGHTDY | 60 |
| ADSVKGRFTI SRDNSKNTLY LQMNSLRAED TAVYYCAYRR TGIPRRDAFD IWGQGTMVTV | 120 |
| SSASTKGPSV FPLAPSSKS | 139 |
| M195-A12 LC | |
| QDIQMTQSPS TLSASVGDRV TITCRASQSI SSWLAWYQQK PGKAPNLLIY KASTLESGVP | 60 |
| SRFSGSGSGT EFTLTISSLQ PDDFATYYCQ QYNTYWTFGQ GTKVEIK | 107 |
| M195-A12 HC | |
| EVQLLESGGG LVQPGGSLRL SCAASGFTFS PYMMMWVRQA PGKGLEWVSG IYPSGGYTVY | 60 |
| ADSVKGRFTI SRDNSKNTLY LQMNSLRAED TAVYYCAYRR TGIPRRDAFD IWGQGTMVTV | 120 |
| SSASTKGPSV FPLAPSSKS | 139 |
| M195-B02 LC | |
| QDIQMTQSPS TLSASVGDRV TITCRASQSI SSWLAWYQQK PGKAPNLLIY KASTLESGVP | 60 |
| SRFSGSGSGT EFTLTISSLQ PDDFATYYCQ QYNTYWTFGQ GTKVEIK | 107 |
| M195-B02 HC | |
| EVQLLESGGG LVQPGGSLRL SCAASGFTFS PYLMWWVRQA PGKGLEWVSY IGPSGGPTHY | 60 |
| ADSVKGRFTI SRDNSKNTLY LQMNSLRAED TAVYYCAYRR TGIPRRDAFD IWGQGTMVTV | 120 |
| SSASTKGPSV FPLAPSSKS | 139 |
| M195-B12 LC | |
| QDIQMTQSPS TLSASVGDRV TITCRASQSI SSWLAWYQQK PGKAPNLLIY KASTLESGVP | 60 |
| SRFSGSGSGT EFTLTISSLQ PDDFATYYCQ QYNTYWTFGQ GTKVEIK | 107 |
| M195-B12 HC | |
| EVQLLESGGG LVQPGGSLRL SCAASGFTFS KYWMYWVRQA PGKGLEWVSY IRPSGGQTYY | 60 |
| ADSVKGRFTI SRDNSKNTLY LQMNSLRAED TAVYYCAYRR TGIPRRDAFD IWGQGTMVTV | 120 |
| SSASTKGPSV FPLAPSSKS | 139 |
| M195-C12 LC | |
| QDIQMTQSPS TLSASVGDRV TITCRASQSI SSWLAWYQQK PGKAPNLLIY KASTLESGVP | 60 |
| SRFSGSGSGT EFTLTISSLQ PDDFATYYCQ QYNTYWTFGQ GTKVEIK | 107 |
| M195-C12 HC | |
| EVQLLESGGG LVQPGGSLRL SCAASGFTFS MYQMFWVRQA PGKGLEWVSS ISPGGGTQYA | 60 |
| DSVKGRFTIS RDNSKNTLYL QMNSLRAEDT AVYYCAYRRT GIPRRDAFDI WGQGTMVTVS | 120 |
| SASTKGPSVF PLAPSSKS | 138 |
| M195-D12 LC | |
| QDIQMTQSPS TLSASVGDRV TITCRASQSI SSWLAWYQQK PGKAPNLLIY KASTLESGVP | 60 |
| SRFSGSGSGT EFTLTISSLQ PDDFATYYCQ QYNTYWTFGQ GTKVEIK | 107 |
| M195-D12 HC | |
| EVQLLESGGG LVQPGGSLRL SCAASGFTFS IYGMFWVRQA PGKGLEWVSG IGPSGGPTKY | 60 |
| ADSVKGRFTI SRDNSKNTLY LQMNSLRAED TAVYYCAYRR TGIPRRDAFD IWGQGTMVTV | 120 |
| SSASTKGPSV FPLAPSSKS | 139 |
| M195-E12 LC | |
| QDIQMTQSPS TLSASVGDRV TITCRASQSI SSWLAWYQQK PGKAPNLLIY KASTLESGVP | 60 |
| SRFSGSGSGT EFTLTISSLQ PDDFATYYCQ QYNTYWTFGQ GTKVEIK | 107 |
| M195-E12 HC | |
| EVQLLESGGG LVQPGGSLRL SCAASGFTFS YYIMFWVRQA PGKGLEWVSY ISPSGGYTHY | 60 |
| ADSVKGRFTI SRDNSKNTLY LQMNSLRAED TAVYYCAYRR TGIPRRDAFD IWGQGTMVTV | 120 |
| SSASTKGPSV FPLAPSSKS | 139 |
| M195-F12 LC | |
| QDIQMTQSPS TLSASVGDRV TITCRASQSI SSWLAWYQQK PGKAPNLLIY KASTLESGVP | 60 |
| SRFSGSGSGT EFTLTISSLQ PDDFATYYCQ QYNTYWTFGQ GTKVEIK | 107 |
| M195-F12 HC | |
| EVQLLESGGG LVQPGGSLRL SCAASGFTFS HYVMMWVRQA PGKGLEWVSY IVPSGGVTAY | 60 |
| ADSVKGRFTI SRDNSKNTLY LQMNSLRAED TAVYYCAYRR TGIPRRDAFD IWGQGTMVTV | 120 |
| SSASTKGPSV FPLAPSSKS | 139 |
| M0195-G02 LC | |
| QDIQMTQSPS TLSASVGDRV TITCRASQSI SSWLAWYQQK PGKAPNLLIY KASTLESGVP | 60 |
| SRFSGSGSGT EFTLTISSLQ PDDFATYYCQ QYNTYWTFGQ GTKVEIK | 107 |
| M195-G02 HC | |
| EVQLLESGGG LVQPGGSLRL SCAASGFTFS PYNMMWVRQA PGKGLEWVSS IWPSGGTTDY | 60 |
| ADSVKGRFTI SRDNSKNTLY LQMNSLRAED TAVYYCAYRR TGIPRRDAFD IWGQGTMVTV | 120 |
| SSASTKGPSV FPLAPSSKS | 139 |
| M196-C06 LC | |
| QDIQMTQSPS TLSASVGDRV TITCRASQSI SSWLAWYQQK PGKAPNLLIY KASTLESGVP | 60 |
| SRFSGSGSGT EFTLTISSLQ PDDFATYYCQ QYNTYWTFGQ GTKVEIK | 107 |
| M196-C06 HC | |
| EVQLLESGGG LVQPGGSLRL SCAASGFTFS IYSMHWVRQA PGKGLEWVSS IYPSRGMTWY | 60 |
| ADSVKGRFTI SRDNSKNTLY LQMNSLRAED TAVYYCAYRR TGIPRRDAFD IWGQGTMVTV | 120 |
| SSASTKGPSV FPLAPSSKS | 139 |
| M196-D02 LC | |
| QDIQMTQSPS TLSASVGDRV TITCRASQSI SSWLAWYQQK PGKAPNLLIY KASTLESGVP | 60 |
| SRFSGSGSGT EFTLTISSLQ PDDFATYYCQ QYNTYWTFGQ GTKVEIK | 107 |
| M196-D02 HC | |
| EVQLLESGGG LVQPGGSLRL SCAASGFTFS VYSMHWVRQA PGKGLEWVSV IGPSGGITLY | 60 |
| ADSVKGRFTI SRDNSKNTLY LQMNSLRAED TAVYYCAYRR TGIPRRDAFD IWGQGTMVTV | 120 |
| SSASTKGPSV FPLAPSSKS | 139 |
| M196-D12 LC | |
| QDIQMTQSPS TLSASVGDRV TITCRASQSI SSWLAWYQQK PGKAPNLLIY KASTLESGVP | 60 |
| SRFSGSGSGT EFTLTISSLQ PDDFATYYCQ QYNTYWTFGQ GTKVEIK | 107 |
| M196-D12 HC | |
| EVQLLESGGG LVQPGGSLRL SCAASGFTFS RYSMRWVRQA PGKGLEWVSV IYPSGGQTYY | 60 |
| ADSVKGRFTI SRDNSKNTLY LQMNSLRAED TAVYYCAYRR TGIPRRDAFD IWGQGTMVTV | 120 |
| SSASTKGPSV FPLAPSSKS | 139 |
| M196-G12 LC | |
| QDIQMTQSPS TLSASVGDRV TITCRASQSI SSWLAWYQQK PGKAPNLLIY KASTLESGVP | 60 |
| SRFSGSGSGT EFTLTISSLQ PDDFATYYCQ QYNTYWTFGQ GTKVEIK | 107 |
| M196-G12 HC | |
| EVQLLESGGG LVQPGGSLRL SCAASGFTFS NYSMDWVRQA PGKGLEWVSR IYSSGGGTIY | 60 |
| ADSVKGRFTI SRDNSKNTLY LQMNSLRAED TAVYYCAYRR TGIPRRDAFD IWGQGTMVTV | 120 |
| SSASTKGPSV FPLAPSSKS | 139 |
| M196-H03 LC | |
| QDIQMTQSPS TLSASVGDRV TITCRASQSI SSWLAWYQQK PGKAPNLLIY KASTLESGVP | 60 |
| SRFSGSGSGT EFTLTISSLQ PDDFATYYCQ QYNTYWTFGQ GTKVEIK | 107 |
| M196-H03 HC | |
| EVQLLESGGG LVQPGGSLRL SCAASGFTFS RYVMWWVRQA PGKGLEWVSS ISPSGDTHYA | 60 |
| DSVKGRFTIS RDNSKNTLYL QMNSLRAEDT AVYYCAYRRT GIPRRDAFDI WGQGTMVTVS | 120 |
| SASTKGPSVF PLAPSSKS | 138 |
| M197-A01 LC | |
| QDIQMTQSPS TLSASVGDRV TITCRASQSI SSWLAWYQQK PGKAPNLLIY KASTLESGVP | 60 |
| SRFSGSGSGT EFTLTISSLQ PDDFATYYCQ QYNTYWTFGQ GTKVEIK | 107 |
| M197-A01 HC | |
| EVQLLESGGG LVQPGGSLRL SCAASGFTFS IYDMIWVRQA PGKGLEWVSS IYPSGGNTSY | 60 |
| ADSVKGRFTI SRDNSKNTLY LQMNSLRAED TAVYYCAYRR TGIPRRDAFD IWGQGTMVTV | 120 |
| SSASTKGPSV FPLAPSSKS | 139 |
| M197-A08 LC | |
| QDIQMTQSPS TLSASVGDRV TITCRASQSI SSWLAWYQQK PGKAPNLLIY KASTLESGVP | 60 |
| SRFSGSGSGT EFTLTISSLQ PDDFATYYCQ QYNTYWTFGQ GTKVEIK | 107 |
| M197-A08 HC | |
| EVQLLESGGG LVQPGGSLRL SCAASGFTFS IYSMQWVRQA PGKGLEWVSS IGSSGGKTLY | 60 |
| ADSVKGRFTI SRDNSKNTLY LQMNSLRAED TAVYYCAYRR TGIPRRDAFD IWGQGTMVTV | 120 |
| SSASTKGPSV FPLAPSSKS | 139 |
| M197-A09 LC | |
| QDIQMTQSPS TLSASVGDRV TITCRASQSI SSWLAWYQQK PGKAPNLLIY KASTLESGVP | 60 |
| SRFSGSGSGT EFTLTISSLQ PDDFATYYCQ QYNTYWTFGQ GTKVEIK | 107 |
| M197-A09 HC | |
| EVQLLESGGG LVQPGGSLRL SCAASGFTFS VYNMHWVRQA PGKGLEWVSS IYPSGGMTTY | 60 |
| ADSVKGRFTI SRDNSKNTLY LQMNSLRAED TAVYYCAYRR TGIPRRDAFD IWGQGTMVTV | 120 |
| SSASTKGPSV FPLAPSSKS | 139 |
| M197-C12 LC | |
| QDIQMTQSPS TLSASVGDRV TITCRASQSI SSWLAWYQQK PGKAPNLLIY KASTLESGVP | 60 |
| SRFSGSGSGT EFTLTISSLQ PDDFATYYCQ QYNTYWTFGQ GTKVEIK | 107 |
| M197-C12 HC | |
| EVQLLESGGG LVQPGGSLRL SCAASGFTFS PYDMLWVRQA PGKGLEWVSY IVSSGGLTKY | 60 |
| ADSVKGRFTI SRDNSKNTLY LQMNSLRAED TAVYYCAYRR TGIPRRDAFD IWGQGTMVTV | 120 |
| SSASTKGPSV FPLAPSSKS | 139 |
| M197-E12 LC | |
| QDIQMTQSPS TLSASVGDRV TITCRASQSI SSWLAWYQQK PGKAPNLLIY KASTLESGVP | 60 |
| SRFSGSGSGT EFTLTISSLQ PDDFATYYCQ QYNTYWTFGQ GTKVEIK | 107 |
| M197-E12 HC | |
| EVQLLESGGG LVQPGGSLRL SCAASGFTFS TYTMRWVRQA PGKGLEWVSS IYPSGGKTQY | 60 |
| ADSVKGRFTI SRDNSKNTLY LQMNSLRAED TAVYYCAYRR TGIPRRDAFD IWGQGTMVTV | 120 |
| SSASTKGPSV FPLAPSSKS | 139 |
| M197-F01 LC | |
| QDIQMTQSPS TLSASVGDRV TITCRASQSI SSWLAWYQQK PGKAPNLLIY KASTLESGVP | 60 |
| SRFSGSGSGT EFTLTISSLQ PDDFATYYCQ QYNTYWTFGQ GTKVEIK | 107 |
| M197-F01 HC | |
| EVQLLESGGG LVQPGGSLRL SCAASGFTFS IYHMYWVRQA PGKGLEWVSS IGPSGGPTGY | 60 |
| ADSVKGRFTI SRDNSKNTLY LQMNSLRAED TAVYYCAYRR TGIPRRDAFD IWGQGTMVTV | 120 |
| SSASTKGPSV FPLAPSSKS | 139 |
| M197-F03 LC | |
| QDIQMTQSPS TLSASVGDRV TITCRASQSI SSWLAWYQQK PGKAPNLLIY KASTLESGVP | 60 |
| SRFSGSGSGT EFTLTISSLQ PDDFATYYCQ QYNTYWTFGQ GTKVEIK | 107 |
| M197-F03 HC | |
| EVQLLESGGG LVQPGGSLRL SCAASGFTFS IYSMFWVRQA PGKGLEWVSS IGPSGGVTHY | 60 |
| ADSVKGRFTI SRDNSKNTLY LQMNSLRAED TAVYYCAYRR TGIPRRDAFD IWGQGTMVTV | 120 |
| SSASTKGPSV FPLAPSSKS | 139 |
| M197-G10 LC | |
| QDIQMTQSPS TLSASVGDRV TITCRASQSI SSWLAWYQQK PGKAPNLLIY KASTLESGVP | 60 |
| SRFSGSGSGT EFTLTISSLQ PDDFATYYCQ QYNTYWTFGQ GTKVEIK | 107 |
| M197-G10 HC | |
| EVQLLESGGG LVQPGGSLRL SCAASGFTFS VYAMRWVRQA PGKGLEWVSS IYPSGGKTWY | 60 |
| ADSVKGRFTI SRDNSKNTLY LQMNSLRAED TAVYYCAYRR TGIPRRDAFD IWGQGTMVTV | 120 |
| SSASTKGPSV FPLAPSSKS | 139 |
| M197-G11 LC | |
| QDIQMTQSPS TLSASVGDRV TITCRASQSI SSWLAWYQQK PGKAPNLLIY KASTLESGVP | 60 |
| SRFSGSGSGT EFTLTISSLQ PDDFATYYCQ QYNTYWTFGQ GTKVEIK | 107 |
| M197-G11 HC | |
| EVQLLESGGG LVQPGGSLRL SCAASGFTFS TYAMVWVRQA PGKGLEWVSS IYPSGGITTY | 60 |
| ADSVKGRFTI SRDNSKNTLY LQMNSLRAED TAVYYCAYRR TGIPRRDAFD IWGQGTMVTV | 120 |
| SSASTKGPSV FPLAPSSKS | 139 |
| M197-H10 LC | |
| QDIQMTQSPS TLSASVGDRV TITCRASQSI SSWLAWYQQK PGKAPNLLIY KASTLESGVP | 60 |
| SRFSGSGSGT EFTLTISSLQ PDDFATYYCQ QYNTYWTFGQ GTKVEIK | 107 |
| M197-H10 HC | |
| EVQLLESGGG LVQPGGSLRL SCAASGFTFS SYNMHWVRQA PGKGLEWVSS IVPSGGKTNY | 60 |
| ADSVKGRFTI SRDNSKNTLY LQMNSLRAED TAVYYCAYRR TGIPRRDAFD IWGQGTMVTV | 120 |
| SSASTKGPSV FPLAPSSKS | 139 |
| M197-H11 LC | |
| QDIQMTQSPS TLSASVGDRV TITCRASQSI SSWLAWYQQK PGKAPNLLIY KASTLESGVP | 60 |
| SRFSGSGSGT EFTLTISSLQ PDDFATYYCQ QYNTYWTFGQ GTKVEIK | 107 |
| M197-H11 HC | |
| EVQLLESGGG LVQPGGSLRL SCAASGFTFS IYNMIWVRQA PGKGLEWVSS IYPSGGWTTY | 60 |
| ADSVKGRFTI SRDNSKNTLY LQMNSLRAED TAVYYCAYRR TGIPRRDAFD IWGQGTMVTV | 120 |
| SSASTKGPSV FPLAPSSKS | 139 |
| M198-A01 LC | |
| QDIQMTQSPS TLSASVGDRV TITCRASQSI SSWLAWYQQK PGKAPNLLIY KASTLESGVP | 60 |
| SRFSGSGSGT EFTLTISSLQ PDDFATYYCQ QYNTYWTFGQ GTKVEIK | 107 |
| M198-A01 HC | |
| EVQLLESGGG LVQPGGSLRL SCAASGFTFS PYTMIWVRQA PGKGLEWVSS ISSSGGMTPY | 60 |
| ADSVKGRFTI SRDNSKNTLY LQMNSLRAED TAVYYCAYRR TGIPRRDAFD IWGQGTMVTV | 120 |
| SSASTKGPSV FPLAPSSKS | 139 |
| M198-A02 LC | |
| QDIQMTQSPS TLSASVGDRV TITCRASQSI SSWLAWYQQK PGKAPNLLIY KASTLESGVP | 60 |
| SRFSGSGSGT EFTLTISSLQ PDDFATYYCQ QYNTYWTFGQ GTKVEIK | 107 |
| M198-A02 HC | |
| EVQLLESGGG LVQPGGSLRL SCAASGFTFS RYSMIWVRQA PGKGLEWVSS IWSSGGATEY | 60 |
| ADSVKGRFTI SRDNSKNTLY LQMNSLRAED TAVYYCAYRR TGIPRRDAFD IWGQGTMVTV | 120 |
| SSASTKGPSV FPLAPSSKS | 139 |
| M198-A06 LC | |
| QDIQMTQSPS TLSASVGDRV TITCRASQSI SSWLAWYQQK PGKAPNLLIY KASTLESGVP | 60 |
| SRFSGSGSGT EFTLTISSLQ PDDFATYYCQ QYNTYWTFGQ GTKVEIK | 107 |
| M198-A06 HC | |
| EVQLLESGGG LVQPGGSLRL SCAASGFTFS IYSMHWVRQA PGKGLEWVSS IYSSGGPTKY | 60 |
| ADSVKGRFTI SRDNSKNTLY LQMNSLRAED TAVYYCAYRR TGIPRRDAFD IWGQGTMVTV | 120 |
| SSASTKGPSV FPLAPSSKS | 139 |
| M198-A07 LC | |
| QDIQMTQSPS TLSASVGDRV TITCRASQSI SSWLAWYQQK PGKAPNLLIY KASTLESGVP | 60 |
| SRFSGSGSGT EFTLTISSLQ PDDFATYYCQ QYNTYWTFGQ GTKVEIK | 107 |
| M198-A07 HC | |
| EVQLLESGGG LVQPGGSLRL SCAASGFTFS RYQMHWVRQA PGKGLEWVSW ISPSGGITGY | 60 |
| ADSVKGRFTI SRDNSKNTLY LQMNSLRAED TAVYYCAYRR TGIPRRDAFD IWGQGTMVTV | 120 |
| SSASTKGPSV FPLAPSSKS | 139 |
| M198-A08 LC | |
| QDIQMTQSPS TLSASVGDRV TITCRASQSI SSWLAWYQQK PGKAPNLLIY KASTLESGVP | 60 |
| SRFSGSGSGT EFTLTISSLQ PDDFATYYCQ QYNTYWTFGQ GTKVEIK | 107 |
| M198-A08 HC | |
| EVQLLESGGG LVQPGGSLRL SCAASGFTFS WYMMQWVRQA PGKGLEWVSR ISPSGGTTYA | 60 |
| DSVKGRFTIS RDNSKNTLYL QMNSLRAEDT AVYYCAYRRT GIPRRDAFDI WGQGTMVTVS | 120 |
| SASTKGPSVF PLAPSSKS | 138 |
| M198-A09 LC | |
| QDIQMTQSPS TLSASVGDRV TITCRASQSI SSWLAWYQQK PGKAPNLLIY KASTLESGVP | 60 |
| SRFSGSGSGT EFTLTISSLQ PDDFATYYCQ QYNTYWTFGQ GTKVEIK | 107 |
| M198-A09 HC | |
| EVQLLESGGG LVQPGGSLRL SCAASGFTFS IYFMSWVRQA PGKGLEWVSS IRSSGGPTWY | 60 |
| ADSVKGRFTI SRDNSKNTLY LQMNSLRAED TAVYYCAYRR TGIPRRDAFD IWGQGTMVTV | 120 |
| SSASTKGPSV FPLAPSSKS | 139 |
| M198-B09 LC | |
| QDIQMTQSPS TLSASVGDRV TITCRASQSI SSWLAWYQQK PGKAPNLLIY KASTLESGVP | 60 |
| SRFSGSGSGT EFTLTISSLQ PDDFATYYCQ QYNTYWTFGQ GTKVEIK | 107 |
| M198-B09 HC | |
| EVQLLESGGG LVQPGGSLRL SCAASGFTFS VYSMTWVRQA PGKGLEWVSS IGSSGGSTTY | 60 |
| ADSVKGRFTI SRDNSKNTLY LQMNSLRAED TAVYYCAYRR TGIPRRDAFD IWGQGTMVTV | 120 |
| SSASTKGPSV FPLAPSSKS | 139 |
| M198-B12 LC | |
| QDIQMTQSPS TLSASVGDRV TITCRASQSI SSWLAWYQQK PGKAPNLLIY KASTLESGVP | 60 |
| SRFSGSGSGT EFTLTISSLQ PDDFATYYCQ QYNTYWTFGQ GTKVEIK | 107 |
| M198-B12 HC | |
| EVQLLESGGG LVQPGGSLRL SCAASGFTFS KYSMAWVRQA PGKGLEWVSG IYPSGGRTLY | 60 |
| ADSVKGRFTI SRDNSKNTLY LQMNSLRAED TAVYYCAYRR TGIPRRDAFD IWGQGTMVTV | 120 |
| SSASTKGPSV FPLAPSSKS | 139 |
| M198-C03 LC | |
| QDIQMTQSPS TLSASVGDRV TITCRASQSI SSWLAWYQQK PGKAPNLLIY KASTLESGVP | 60 |
| SRFSGSGSGT EFTLTISSLQ PDDFATYYCQ QYNTYWTFGQ GTKVEIK | 107 |
| M198-C03 HC | |
| EVQLLESGGG LVQPGGSLRL SCAASGFTFS RYSMSWVRQA PGKGLEWVSG ISPSGGETSY | 60 |
| ADSVKGRFTI SRDNSKNTLY LQMNSLRAED TAVYYCAYRR TGIPRRDAFD IWGQGTMVTV | 120 |
| SSASTKGPSV FPLAPSSKS | 139 |
| M198-C05 LC | |
| QDIQMTQSPS TLSASVGDRV TITCRASQSI SSWLAWYQQK PGKAPNLLIY KASTLESGVP | 60 |
| SRFSGSGSGT EFTLTISSLQ PDDFATYYCQ QYNTYWTFGQ GTKVEIK | 107 |
| M198-C05 HC | |
| EVQLLESGGG LVQPGGSLRL SCAASGFTFS RYKMYWVRQA PGKGLEWVSV IGPSGGATFY | 60 |
| ADSVKGRFTI SRDNSKNTLY LQMNSLRAED TAVYYCAYRR TGIPRRDAFD IWGQGTMVTV | 120 |
| SSASTKGPSV FPLAPSSKS | 139 |
| M198-C06 LC | |
| QDIQMTQSPS TLSASVGDRV TITCRASQSI SSWLAWYQQK PGKAPNLLIY KASTLESGVP | 60 |
| SRFSGSGSGT EFTLTISSLQ PDDFATYYCQ QYNTYWTFGQ GTKVEIK | 107 |
| M198-C06 HC | |
| EVQLLESGGG LVQPGGSLRL SCAASGFTFS QYFMHWVRQA PGKGLEWVSY IYPSGGMTEY | 60 |
| ADSVKGRFTI SRDNSKNTLY LQMNSLRAED TAVYYCAYRR TGIPRRDAFD IWGQGTMVTV | 120 |
| SSASTKGPSV FPLAPSSKS | 139 |
| M198-C09 LC | |
| QDIQMTQSPS TLSASVGDRV TITCRASQSI SSWLAWYQQK PGKAPNLLIY KASTLESGVP | 60 |
| SRFSGSGSGT EFTLTISSLQ PDDFATYYCQ QYNTYWTFGQ GTKVEIK | 107 |
| M198-C09 HC | |
| EVQLLESGGG LVQPGGSLRL SCAASGFTFS IYTMYWVRQA PGKGLEWVSS ISPSGGWTYY | 60 |
| ADSVKGRFTI SRDNSKNTLY LQMNSLRAED TAVYYCAYRR TGIPRRDAFD IWGQGTMVTV | 120 |
| SSASTKGPSV FPLAPSSKS | 139 |
| M198-C10 LC | |
| QDIQMTQSPS TLSASVGDRV TITCRASQSI SSWLAWYQQK PGKAPNLLIY KASTLESGVP | 60 |
| SRFSGSGSGT EFTLTISSLQ PDDFATYYCQ QYNTYWTFGQ GTKVEIK | 107 |
| M198-C10 HC | |
| EVQLLESGGG LVQPGGSLRL SCAASGFTFS HYMGMNWVRQ APGKGLEWVS SIVPSGGWTQ | 60 |
| YADSVKGRFT ISRDNSKNTL YLQMNSLRAE DTAVYYCAYR RTGIPRRDAF DIWGQGTMVT | 120 |
| VSSASTKGPS VFPLAPSSKS | 140 |
| M198-D12 LC | |
| QDIQMTQSPS TLSASVGDRV TITCRASQSI SSWLAWYQQK PGKAPNLLIY KASTLESGVP | 60 |
| SRFSGSGSGT EFTLTISSLQ PDDFATYYCQ QYNTYWTFGQ GTKVEIK | 107 |
| M198-D12 HC | |
| EVQLLESGGG LVQPGGSLRL SCAASGFTFS LYVMYWVRQA PGKGLEWVSY IVPSGGPTAY | 60 |
| ADSVKGRFTI SRDNSKNTLY LQMNSLRAED TAVYYCAYRR TGIPRRDAFD IWGQGTMVTV | 120 |
| SSASTKGPSV FPLAPSSKS | 139 |
| M198-E02 LC | |
| QDIQMTQSPS TLSASVGDRV TITCRASQSI SSWLAWYQQK PGKAPNLLIY KASTLESGVP | 60 |
| SRFSGSGSGT EFTLTISSLQ PDDFATYYCQ QYNTYWTFGQ GTKVEIK | 107 |
| M198-E02 HC | |
| EVQLLESGGG LVQPGGSLRL SCAASGFTFS IYSMYWVRQA PGKGLEWVSY IRPSGGNTKY | 60 |
| ADSVKGRFTI SRDNSKNTLY LQMNSLRAED TAVYYCAYRR TGIPRRDAFD IWGQGTMVTV | 120 |
| SSASTKGPSV FPLAPSSKS | 139 |
| M198-E09 LC | |
| QDIQMTQSPS TLSASVGDRV TITCRASQSI SSWLAWYQQK PGKAPNLLIY KASTLESGVP | 60 |
| SRFSGSGSGT EFTLTISSLQ PDDFATYYCQ QYNTYWTFGQ GTKVEIK | 107 |
| M198-E09 HC | |
| EVQLLESGGG LVQPGGSLRL SCAASGFTFS IYDMNWVRQA PGKGLEWVSS IYPSGGRTRY | 60 |
| ADSVKGRFTI SRDNSKNTLY LQMNSLRAED TAVYYCAYRR TGIPRRDAFD IWGQGTMVTV | 120 |
| SSASTKGPSV FPLAPSSKS | 139 |
| M198-E11 LC | |
| QDIQMTQSPS TLSASVGDRV TITCRASQSI SSWLAWYQQK PGKAPNLLIY KASTLESGVP | 60 |
| SRFSGSGSGT EFTLTISSLQ PDDFATYYCQ QYNTYWTFGQ GTKVEIK | 107 |
| M198-E11 HC | |
| EVQLLESGGG LVQPGGSLRL SCAASGFTFS TYSMYWVRQA PGKGLEWVSS IYPSGGLTWY | 60 |
| ADSVKGRFTI SRDNSKNTLY LQMNSLRAED TAVYYCAYRR TGIPRRDAFD IWGQGTMVTV | 120 |
| SSASTKGPSV FPLAPSSKS | 139 |
| M198-F04 LC | |
| QDIQMTQSPS TLSASVGDRV TITCRASQSI SSWLAWYQQK PGKAPNLLIY KASTLESGVP | 60 |
| SRFSGSGSGT EFTLTISSLQ PDDFATYYCQ QYNTYWTFGQ GTKVEIK | 107 |
| M198-F04 HC | |
| EVQLLESGGG LVQPGGSLRL SCAASGFTFS IYDMWWVRQA PGKGLEWVSS IRPSGGITKY | 60 |
| ADSVKGRFTI SRDNSKNTLY LQMNSLRAED TAVYYCAYRR TGIPRRDAFD IWGQGTMVTV | 120 |
| SSASTKGPSV FPLAPSSKS | 139 |
| M198-F08 LC | |
| QDIQMTQSPS TLSASVGDRV TITCRASQSI SSWLAWYQQK PGKAPNLLIY KASTLESGVP | 60 |
| SRFSGSGSGT EFTLTISSLQ PDDFATYYCQ QYNTYWTFGQ GTKVEIK | 107 |
| M198-F08 HC | |
| EVQLLESGGG LVQPGGSLRL SCAASGFTFS VYSMWWVRQA PGKGLEWVSS ISSSGGMTEY | 60 |
| ADSVKGRFTI SRDNSKNTLY LQMNSLRAED TAVYYCAYRR TGIPRRDAFD IWGQGTMVTV | 120 |
| SSASTKGPSV FPLAPSSKS | 139 |
| M198-F09 LC | |
| QDIQMTQSPS TLSASVGDRV TITCRASQSI SSWLAWYQQK PGKAPNLLIY KASTLESGVP | 60 |
| SRFSGSGSGT EFTLTISSLQ PDDFATYYCQ QYNTYWTFGQ GTKVEIK | 107 |
| M198-F09 HC | |
| EVQLLESGGG LVQPGGSLRL SCAASGFTFS VYNMHWVRQA PGKGLEWVSS IYPSGGMTYY | 60 |
| ADSVKGRFTI SRDNSKNTLY LQMNSLRAED TAVYYCAYRR TGIPRRDAFD IWGQGTMVTV | 120 |
| SSASTKGPSV FPLAPSSKS | 139 |
| M198-F12 LC | |
| QDIQMTQSPS TLSASVGDRV TITCRASQSI SSWLAWYQQK PGKAPNLLIY KASTLESGVP | 60 |
| SRFSGSGSGT EFTLTISSLQ PDDFATYYCQ QYNTYWTFGQ GTKVEIK | 107 |
| M198-F12 HC | |
| EVQLLESGGG LVQPGGSLRL SCAASGFTFS IYTMMWVRQA PGKGLEWVSS IWSSGGQTKY | 60 |
| ADSVKGRFTI SRDNSKNTLY LQMNSLRAED TAVYYCAYRR TGIPRRDAFD IWGQGTMVTV | 120 |
| SSASTKGPSV FPLAPSSKS | 139 |
| M198-G03 LC | |
| QDIQMTQSPS TLSASVGDRV TITCRASQSI SSWLAWYQQK PGKAPNLLIY KASTLESGVP | 60 |
| SRFSGSGSGT EFTLTISSLQ PDDFATYYCQ QYNTYWTFGQ GTKVEIK | 107 |
| M198-G03 HC | |
| EVQLLESGGG LVQPGGSLRL SCAASGFTFS QYTMVWVRQA PGKGLEWVSW IYSSRANYAD | 60 |
| SVKGRFTISR DNSKNTLYLQ MNSLRAEDTA VYYCAYRRTG IPRRDAFDIW GQGTMVTVSS | 120 |
| ASTKGPSVFP LAPSSKS | 137 |
| M198-G07 LC | |
| QDIQMTQSPS TLSASVGDRV TITCRASQSI SSWLAWYQQK PGKAPNLLIY KASTLESGVP | 60 |
| SRFSGSGSGT EFTLTISSLQ PDDFATYYCQ QYNTYWTFGQ GTKVEIK | 107 |
| M198-G07 HC | |
| EVQLLESGGG LVQPGGSLRL SCAASGFTFS IYDMTWVRQA PGKGLEWVSS IYPSGGQTIY | 60 |
| ADSVKGRFTI SRDNSKNTLY LQMNSLRAED TAVYYCAYRR TGIPRRDAFD IWGQGTMVTV | 120 |
| SSASTKGPSV FPLAPSSKS | 139 |
| M198-H02 LC | |
| QDIQMTQSPS TLSASVGDRV TITCRASQSI SSWLAWYQQK PGKAPNLLIY KASTLESGVP | 60 |
| SRFSGSGSGT EFTLTISSLQ PDDFATYYCQ QYNTYWTFGQ GTKVEIK | 107 |
| M198-H02 HC | |
| EVQLLESGGG LVQPGGSLRL SCAASGFTFS PYNMYWVRQA PGKGLEWVSW IVPGGVTKYA | 60 |
| DSVKGRFTIS RDNSKNTLYL QMNSLRAEDT AVYYCAYRRT GIPRRDAFDI WGQGTMVTVS | 120 |
| SASTKGPSVF PLAPSSKS | 138 |
| M198-H08 LC | |
| QDIQMTQSPS TLSASVGDRV TITCRASQSI SSWLAWYQQK PGKAPNLLIY KASTLESGVP | 60 |
| SRFSGSGSGT EFTLTISSLQ PDDFATYYCQ QYNTYWTFGQ GTKVEIK | 107 |
| M198-H08 HC | |
| EVQLLESGGG LVQPGGSLRL SCAASGFTFS IYDMYWVRQA PGKGLEWVSS IGPSGGPTAY | 60 |
| ADSVKGRFTI SRDNSKNTLY LQMNSLRAED TAVYYCAYRR TGIPRRDAFD IWGQGTMVTV | 120 |
| SSASTKGPSV FPLAPSSKS | 139 |
| M198-H09 LC | |
| QDIQMTQSPS TLSASVGDRV TITCRASQSI SSWLAWYQQK PGKAPNLLIY KASTLESGVP | 60 |
| SRFSGSGSGT EFTLTISSLQ PDDFATYYCQ QYNTYWTFGQ GTKVEIK | 107 |
| M198-H09 HC | |
| EVQLLESGGG LVQPGGSLRL SCAASGFTFS IYLMIWVRQA PGKGLEWVSY IGPSGGPTEY | 60 |
| ADSVKGRFTI SRDNSKNTLY LQMNSLRAED TAVYYCAYRR TGIPRRDAFD IWGQGTMVTV | 120 |
| SSASTKGPSV FPLAPSSKS | 139 |
| M199-A08 LC | |
| QDIQMTQSPS TLSASVGDRV TITCRASQSI SSWLAWYQQK PGKAPNLLIY KASTLESGVP | 60 |
| SRFSGSGSGT EFTLTISSLQ PDDFATYYCQ QYNTYWTFGQ GTKVEIK | 107 |
| M199-A08 HC | |
| EVQLLESGGG LVQPGGSLRL SCAASGFTFS HYIMMWVRQA PGKGLEWVSG IYSSGGITVY | 60 |
| ADSVKGRFTI SRDNSKNTLY LQMNSLRAED TAVYYCAYRR IGVPRRDEFD IWGQGTMVTV | 120 |
| SSASTKGPSV FPLAPSSKS | 139 |
| M199-A11 LC | |
| QDIQMTQSPS TLSASVGDRV TITCRASQSI SSWLAWYQQK PGKAPNLLIY KASTLESGVP | 60 |
| SRFSGSGSGT EFTLTISSLQ PDDFATYYCQ QYNTYWTFGQ GTKVEIK | 107 |
| M199-A11 HC | |
| EVQLLESGGG LVQPGGSLRL SCAASGFTFS HYIMMWVRQA PGKGLEWVSG IYSSGGITVY | 60 |
| ADSVKGRFTI SRDNSKNTLY LQMNSLRAED TAVYYCAYRR RGIPRRDAFD IWGQGTMVTV | 120 |
| SSASTKGPSV FPLAPSSKS | 139 |
| M199-B01 LC | |
| QDIQMTQSPS TLSASVGDRV TITCRASQSI SSWLAWYQQK PGKAPNLLIY KASTLESGVP | 60 |
| SRFSGSGSGT EFTLTISSLQ PDDFATYYCQ QYNTYWTFGQ GTKVEIK | 107 |
| M199-B01 HC | |
| EVQLLESGGG LVQPGGSLRL SCAASGFTFS HYIMMWVRQA PGKGLEWVSG IYSSGGITVY | 60 |
| ADSVKGRFTI SRDNSKNTLY LQMNSLRAED TAVYYCAFRR TGIPRRDAFD NWGQGTMVTV | 120 |
| SSASTKGPSV FPLAPSSKS | 139 |
| M200-A10 LC | |
| QDIQMTQSPS TLSASVGDRV TITCRASQSI SSWLAWYQQK PGKAPNLLIY KASTLESGVP | 60 |
| SRFSGSGSGT EFTLTISSLQ PDDFATYYCQ QYNTYWTFGQ GTKVEIK | 107 |
| M200-A10 HC | |
| EVQLLESGGG LVQPGGSLRL SCAASGFTFS HYIMMWVRQA PGKGLEWVSG IYSSGGITVY | 60 |
| ADSVKGRFTI SRDNSKNTLY LQMNSLRAED TAVYYCAYRR TGVPRRDSFD IWGQGTMVTV | 120 |
| SSASTKGPSV FPLAPSSKS | 139 |
| M200-B01 LC | |
| QDIQMTQSPS TLSASVGDRV TITCRASQSI SSWLAWYQQK PGKAPNLLIY KASTLESGVP | 60 |
| SRFSGSGSGT EFTLTISSLQ PDDFATYYCQ QYNTYWTFGQ GTKVEIK | 107 |
| M200-B01 HC | |
| EVQLLESGGG LVQPGGSLRL SCAASGFTFS HYIMMWVRQA PGKGLEWVSG IYSSGGITVY | 60 |
| ADSVKGRFTI SRDNSKNTLY LQMNSLRAED TAVYYCAYRR TGIPRRDAFD SWGQGTMVTV | 120 |
| SSASTKGPSV FPLAPSSKS | 139 |
| M200-D03 LC | |
| QDIQMTQSPS TLSASVGDRV TITCRASQSI SSWLAWYQQK PGKAPNLLIY KASTLESGVP | 60 |
| SRFSGSGSGT EFTLTISSLQ PDDFATYYCQ QYNTYWTFGQ GTKVEIK | 107 |
| M200-D03 HC | |
| EVQLLESGGG LVQPGGSLRL SCAASGFTFS HYIMMWVRQA PGKGLEWVSG IYSSGGITVY | 60 |
| ADSVKGRFTI SRDNSKNTLY LQMNSLRAED TAVYYCAWRR IGVPRRDSFD MWGQGTMVTV | 120 |
| SSASTKGPSV FPLAPSSKS | 139 |
| M200-E11 LC | |
| QDIQMTQSPS TLSASVGDRV TITCRASQSI SSWLAWYQQK PGKAPNLLIY KASTLESGVP | 60 |
| SRFSGSGSGT EFTLTISSLQ PDDFATYYCQ QYNTYWTFGQ GTKVEIK | 107 |
| M200-E11 HC | |
| EVQLLESGGG LVQPGGSLRL SCAASGFTFS HYIMMWVRQA PGKGLEWVSG IYSSGGITVY | 60 |
| ADSVKGRFTI SRDNSKNTLY LQMNSLRAED TAVYYCAYRR TGVPRRDAFD NWGQGTMVTV | 120 |
| SSASTKGPSV FPLAPSSKS | 139 |
| M200-F01 LC | |
| QDIQMTQSPS TLSASVGDRV TITCRASQSI SSWLAWYQQK PGKAPNLLIY KASTLESGVP | 60 |
| SRFSGSGSGT EFTLTISSLQ PDDFATYYCQ QYNTYWTFGQ GTKVEIK | 107 |
| M200-F01 HC | |
| EVQLLESGGG LVQPGGSLRL SCAASGFTFS HYIMMWVRQA PGKGLEWVSG IYSSGGITVY | 60 |
| ADSVKGRFTI SRDNSKNTLY LQMNSLRAED TAVYYCAYRR MGIPRRNAFD IWGQGTMVTV | 120 |
| SSASTKGPSV FPLAPSSKS | 139 |
| M200-H07 LC | |
| QDIQMTQSPS TLSASVGDRV TITCRASQSI SSWLAWYQQK PGKAPNLLIY KASTLESGVP | 60 |
| SRFSGSGSGT EFTLTISSLQ PDDFATYYCQ QYNTYWTFGQ GTKVEIK | 107 |
| M200-H07 HC | |
| EVQLLESGGG LVQPGGSLRL SCAASGFTFS HYIMMWVRQA PGKGLEWVSG IYSSGGITVY | 60 |
| ADSVKGRFTI SRDNSKNTLY LQMNSLRAED TAVYYCAYRR TGVPRRNAFD NWGQGTMVTV | 120 |
| SSASTKGPSV FPLAPSSKS | 139 |
| M201-A06 LC | |
| QDIQMTQSPS TLSASVGDRV TITCRASQSI SSWLAWYQQK PGKAPNLLIY KASTLESGVP | 60 |
| SRFSGSGSGT EFTLTISSLQ PDDFATYYCQ QYNTYWTFGQ GTKVEIK | 107 |
| M201-A06 HC | |
| EVQLLESGGG LVQPGGSLRL SCAASGFTFS HYIMMWVRQA PGKGLEWVSG IYSSGGITVY | 60 |
| ADSVKGRFTI SRDNSKNTLY LQMNSLRAED TAVYYCAYRR TGIPRRDVFD IWGQGTMVTV | 120 |
| SSASTKGPSV FPLAPSSKS | 139 |
| M201-A07 LC | |
| QDIQMTQSPS TLSASVGDRV TITCRASQSI SSWLAWYQQK PGKAPNLLIY KASTLESGVP | 60 |
| SRFSGSGSGT EFTLTISSLQ PDDFATYYCQ QYNTYWTFGQ GTKVEIK | 107 |
| M201-A07 HC | |
| EVQLLESGGG LVQPGGSLRL SCAASGFTFS HYIMMWVRQA PGKGLEWVSG IYSSGGITVY | 60 |
| ADSVKGRFTI SRDNSKNTLY LQMNSLRAED TAVYYCAYRR TGVPRRDEFD IWGQGTMVTV | 120 |
| SSASTKGPSV FPLAPSSKS | 139 |
| M201-F11 LC | |
| QDIQMTQSPS TLSASVGDRV TITCRASQSI SSWLAWYQQK PGKAPNLLIY KASTLESGVP | 60 |
| SRFSGSGSGT EFTLTISSLQ PDDFATYYCQ QYNTYWTFGQ GTKVEIK | 107 |
| M201-F11 HC | |
| EVQLLESGGG LVQPGGSLRL SCAASGFTFS HYIMMWVRQA PGKGLEWVSG IYSSGGITVY | 60 |
| ADSVKGRFTI SRDNSKNTLY LQMNSLRAED TAVYYCAYRR SGIPRRDAFD IWGQGTMVTV | 120 |
| SSASTKGPSV FPLAPSSKS | 139 |
| M201-H06 LC | |
| QDIQMTQSPS TLSASVGDRV TITCRASQSI SSWLAWYQQK PGKAPNLLIY KASTLESGVP | 60 |
| SRFSGSGSGT EFTLTISSLQ PDDFATYYCQ QYNTYWTFGQ GTKVEIK | 107 |
| M201-H06 HC | |
| EVQLLESGGG LVQPGGSLRL SCAASGFTFS HYIMMWVRQA PGKGLEWVSG IYSSGGITVY | 60 |
| ADSVKGRFTI SRDNSKNTLY LQMNSLRAED TAVYYCAYRR TGVPRRDAFD IWGQGTMVTV | 120 |
| SSASTKGPSV FPLAPSSKS | 139 |
| M201-H08 LC | |
| QDIQMTQSPS TLSASVGDRV TITCRASQSI SSWLAWYQQK PGKAPNLLIY KASTLESGVP | 60 |
| SRFSGSGSGT EFTLTISSLQ PDDFATYYCQ QYNTYWTFGQ GTKVEIK | 107 |
| M201-H08 HC | |
| EVQLLESGGG LVQPGGSLRL SCAASGFTFS HYIMMWVRQA PGKGLEWVSG IYSSGGITVY | 60 |
| ADSVKGRFTI SRDNSKNTLY LQMNSLRAED TAVYYCAYRR TGVPRRDALD NWGQGTMVTV | 120 |
| SSASTKGPSV FPLAPSSKS | 139 |
| M202-A01 LC | |
| QDIQMTQSPS TLSASVGDRV TITCRASQSI SSWLAWYQQK PGKAPNLLIY KASTLESGVP | 60 |
| SRFSGSGSGT EFTLTISSLQ PDDFATYYCQ QYNTYWTFGQ GTKVEIK | 107 |
| M202-A01 HC | |
| EVQLLESGGG LVQPGGSLRL SCAASGFTFS HYIMMWVRQA PGKGLEWVSG IYSSGGITVY | 60 |
| ADSVKGRFTI SRDNSKNTLY LQMNSLRAED TAVYYCAYRR IGVPRRDAFD IWGQGTMVTV | 120 |
| SSASTKGPSV FPLAPSSKS | 139 |
| M202-A04 LC | |
| QDIQMTQSPS TLSASVGDRV TITCRASQSI SSWLAWYQQK PGKAPNLLIY KASTLESGVP | 60 |
| SRFSGSGSGT EFTLTISSLQ PDDFATYYCQ QYNTYWTFGQ GTKVEIK | 107 |
| M202-A04 HC | |
| EVQLLESGGG LVQPGGSLRL SCAASGFTFS HYIMMWVRQA PGKGLEWVSG IYSSGGITVY | 60 |
| ADSVKGRFTI SRDNSKNTLY LQMNSLRAED TAVYYCAYRR KGIPRRDDFD IWGQGTMVTV | 120 |
| SSASTKGPSV FPLAPSSKS | 139 |
| M202-A08 LC | |
| QDIQMTQSPS TLSASVGDRV TITCRASQSI SSWLAWYQQK PGKAPNLLIY KASTLESGVP | 60 |
| SRFSGSGSGT EFTLTISSLQ PDDFATYYCQ QYNTYWTFGQ GTKVEIK | 107 |
| M202-A08 HC | |
| EVQLLESGGG LVQPGGSLRL SCAASGFTFS HYIMMWVRQA PGKGLEWVSG IYSSGGITVY | 60 |
| ADSVKGRFTI SRDNSKNTLY LQMNSLRAED TAVYYCAYRR TGIPRWDAFD IWGQGTMVTV | 120 |
| SSASTKGPSV FPLAPSSKS | 139 |
| M202-A10 LC | |
| QDIQMTQSPS TLSASVGDRV TITCRASQSI SSWLAWYQQK PGKAPNLLIY KASTLESGVP | 60 |
| SRFSGSGSGT EFTLTISSLQ PDDFATYYCQ QYNTYWTFGQ GTKVEIK | 107 |
| M202-A10 HC | |
| EVQLLESGGG LVQPGGSLRL SCAASGFTFS HYIMMWVRQA PGKGLEWVSG IYSSGGITVY | 60 |
| ADSVKGRFTI SRDNSKNTLY LQMNSLRAED TAVYYCAFRR TGIPRRDSFD IWGQGTMVTV | 120 |
| SSASTKGPSV FPLAPSSKS | 139 |
| M202-A12 LC | |
| QDIQMTQSPS TLSASVGDRV TITCRASQSI SSWLAWYQQK PGKAPNLLIY KASTLESGVP | 60 |
| SRFSGSGSGT EFTLTISSLQ PDDFATYYCQ QYNTYWTFGQ GTKVEIK | 107 |
| M202-A12 HC | |
| EVQLLESGGG LVQPGGSLRL SCAASGFTFS HYIMMWVRQA PGKGLEWVSG IYSSGGITVY | 60 |
| ADSVKGRFTI SRDNSKNTLY LQMNSLRAED TAVYYCAYQR TGVPRRDSFD IWGQGTMVTV | 120 |
| SSASTKGPSV FPLAPSSKS | 139 |
| M202-B03 LC | |
| QDIQMTQSPS TLSASVGDRV TITCRASQSI SSWLAWYQQK PGKAPNLLIY KASTLESGVP | 60 |
| SRFSGSGSGT EFTLTISSLQ PDDFATYYCQ QYNTYWTFGQ GTKVEIK | 107 |
| M202-B03 HC | |
| EVQLLESGGG LVQPGGSLRL SCAASGFTFS HYIMMWVRQA PGKGLEWVSG IYSSGGITVY | 60 |
| ADSVKGRFTI SRDNSKNTLY LQMNSLRAED TAVYYCAYRR TGVPRRDDFD IWGQGTMVTV | 120 |
| SSASTKGPSV FPLAPSSKS | 139 |
| M202-B04 LC | |
| QDIQMTQSPS TLSASVGDRV TITCRASQSI SSWLAWYQQK PGKAPNLLIY KASTLESGVP | 60 |
| SRFSGSGSGT EFTLTISSLQ PDDFATYYCQ QYNTYWTFGQ GTKVEIK | 107 |
| M202-B04 HC | |
| EVQLLESGGG LVQPGGSLRL SCAASGFTFS HYIMMWVRQA PGKGLEWVSG IYSSGGITVY | 60 |
| ADSVKGRFTI SRDNSKNTLY LQMNSLRAED TAVYYCAYRR SGVPRRDDFD IWGQGTMVTV | 120 |
| SSASTKGPSV FPLAPSSKS | 139 |
| M202-C01 LC | |
| QDIQMTQSPS TLSASVGDRV TITCRASQSI SSWLAWYQQK PGKAPNLLIY KASTLESGVP | 60 |
| SRFSGSGSGT EFTLTISSLQ PDDFATYYCQ QYNTYWTFGQ GTKVEIK | 107 |
| M202-C01 HC | |
| EVQLLESGGG LVQPGGSLRL SCAASGFTFS HYIMMWVRQA PGKGLEWVSG IYSSGGITVY | 60 |
| ADSVKGRFTI SRDNSKNTLY LQMNSLRAED TAVYYCAYRR TGVPRWDDFD IWGQGTMVTV | 120 |
| SSASTKGPSV FPLAPSSKS | 139 |
| M202-C02 LC | |
| QDIQMTQSPS TLSASVGDRV TITCRASQSI SSWLAWYQQK PGKAPNLLIY KASTLESGVP | 60 |
| SRFSGSGSGT EFTLTISSLQ PDDFATYYCQ QYNTYWTFGQ GTKVEIK | 107 |
| M202-C02 HC | |
| EVQLLESGGG LVQPGGSLRL SCAASGFTFS HYIMMWVRQA PGKGLEWVSG IYSSGGITVY | 60 |
| ADSVKGRFTI SRDNSKNTLY LQMNSLRAED TAVYYCAYRR PGVPRRDAFD IWGQGTMVTV | 120 |
| SSASTKGPSV FPLAPSSKS | 139 |
| M202-C09 LC | |
| QDIQMTQSPS TLSASVGDRV TITCRASQSI SSWLAWYQQK PGKAPNLLIY KASTLESGVP | 60 |
| SRFSGSGSGT EFTLTISSLQ PDDFATYYCQ QYNTYWTFGQ GTKVEIK | 107 |
| M202-C09 HC | |
| EVQLLESGGG LVQPGGSLRL SCAASGFTFS HYIMMWVRQA PGKGLEWVSG IYSSGGITVY | 60 |
| ADSVKGRFTI SRDNSKNTLY LQMNSLRAED TAVYYCAYRR IGVPRRDDFD IWGQGTMVTV | 120 |
| SSASTKGPSV FPLAPSSKS | 139 |
| M202-D09 LC | |
| QDIQMTQSPS TLSASVGDRV TITCRASQSI SSWLAWYQQK PGKAPNLLIY KASTLESGVP | 60 |
| SRFSGSGSGT EFTLTISSLQ PDDFATYYCQ QYNTYWTFGQ GTKVEIK | 107 |
| M202-D09 HC | |
| EVQLLESGGG LVQPGGSLRL SCAASGFTFS HYIMMWVRQA PGKGLEWVSG IYSSGGITVY | 60 |
| ADSVKGRFTI SRDNSKNTLY LQMNSLRAED TAVYYCAYRR IGVPRRDSFD IWGQGTMVTV | 120 |
| SSASTKGPSV FPLAPSSKS | 139 |
| M202-E03 LC | |
| QDIQMTQSPS TLSASVGDRV TITCRASQSI SSWLAWYQQK PGKAPNLLIY KASTLESGVP | 60 |
| SRFSGSGSGT EFTLTISSLQ PDDFATYYCQ QYNTYWTFGQ GTKVEIK | 107 |
| M202-E03 HC | |
| EVQLLESGGG LVQPGGSLRL SCAASGFTFS HYIMMWVRQA PGKGLEWVSG IYSSGGITVY | 60 |
| ADSVKGRFTI SRDNSKNTLY LQMNSLRAED TAVYYCAYRR TGIPRRDAFE IWGQGTMVTV | 120 |
| SSASTKGPSV FPLAPSSKS | 139 |
| M202-E06 LC | |
| QDIQMTQSPS TLSASVGDRV TITCRASQSI SSWLAWYQQK PGKAPNLLIY KASTLESGVP | 60 |
| SRFSGSGSGT EFTLTISSLQ PDDFATYYCQ QYNTYWTFGQ GTKVEIK | 107 |
| M202-E06 HC | |
| EVQLLESGGG LVQPGGSLRL SCAASGFTFS HYIMMWVRQA PGKGLEWVSG IYSSGGITVY | 60 |
| ADSVKGRFTI SRDNSKNTLY LQMNSLRAED TAVYYCAYRR RGVPRRDDFD IWGQGTMVTV | 120 |
| SSASTKGPSV FPLAPSSKS | 139 |
| M202-F06 LC | |
| QDIQMTQSPS TLSASVGDRV TITCRASQSI SSWLAWYQQK PGKAPNLLIY KASTLESGVP | 60 |
| SRFSGSGSGT EFTLTISSLQ PDDFATYYCQ QYNTYWTFGQ GTKVEIK | 107 |
| M202-F06 HC | |
| EVQLLESGGG LVQPGGSLRL SCAASGFTFS HYIMMWVRQA PGKGLEWVSG IYSSGGITVY | 60 |
| ADSVKGRFTI SRDNSKNTLY LQMNSLRAED TAVYYCAYRR TGVPRWDAFD IWGQGTMVTV | 120 |
| SSASTKGPSV FPLAPSSKS | 139 |
| M202-G03 LC | |
| QDIQMTQSPS TLSASVGDRV TITCRASQSI SSWLAWYQQK PGKAPNLLIY KASTLESGVP | 60 |
| SRFSGSGSGT EFTLTISSLQ PDDFATYYCQ QYNTYWTFGQ GTKVEIK | 107 |
| M202-G03 HC | |
| EVQLLESGGG LVQPGGSLRL SCAASGFTFS HYIMMWVRQA PGKGLEWVSG IYSSGGITVY | 60 |
| ADSVKGRFTI SRDNSKNTLY LQMNSLRAED TAVYYCAFRR TGVPRRDSFE IWGQGTMVTV | 120 |
| SSASTKGPSV FPLAPSSKS | 139 |
| M202-H03 LC | |
| QDIQMTQSPS TLSASVGDRV TITCRASQSI SSWLAWYQQK PGKAPNLLIY KASTLESGVP | 60 |
| SRFSGSGSGT EFTLTISSLQ PDDFATYYCQ QYNTYWTFGQ GTKVEIK | 107 |
| M202-H03 HC | |
| EVQLLESGGG LVQPGGSLRL SCAASGFTFS HYIMMWVRQA PGKGLEWVSG IYSSGGITVY | 60 |
| ADSVKGRFTI SRDNSKNTLY LQMNSLRAED TAVYYCAFRR TGVPRWDDFD IWGQGTMVTV | 120 |
| SSASTKGPSV FPLAPSSKS | 139 |
| M202-H05 LC | |
| QDIQMTQSPS TLSASVGDRV TITCRASQSI SSWLAWYQQK PGKAPNLLIY KASTLESGVP | 60 |
| SRFSGSGSGT EFTLTISSLQ PDDFATYYCQ QYNTYWTFGQ GTKVEIK | 107 |
| M202-H05 HC | |
| EVQLLESGGG LVQPGGSLRL SCAASGFTFS HYIMMWVRQA PGKGLEWVSG IYSSGGITVY | 60 |
| ADSVKGRFTI SRDNSKNTLY LQMNSLRAED TAVYYCAFRR TGVPRRDVFD IWGQGTMVTV | 120 |
| SSASTKGPSV FPLAPSSKS | 139 |

TABLE 9

Sequences of Antibodies Obtained from CDR1/2 and CDR3 Spiking Affinity
Maturation Libraries Based on X63-G06

| | | | | | | | | |
|---|---|---|---|---|---|---|---|---|
| | | human | | | | | | |
| | % inhibition | pKal | | | | | | |
| Antibody | at | Ki, app | | | | HV- | | |
| I.D. | 10 nM | (nM) | LV-CDR1 | LV-CDR2 | LV-CDR3 | CDR1 | HV-CDR2 | HV-CDR3 |

| | | | | | | | | |
|---|---|---|---|---|---|---|---|---|
| M209-F04 | 97.6 | 0.09 | RTSQFVNSNYLA | GASSRAT | QQSSRTPWT | HYLMT | YISPSGGHTIYADSVKG | VARGIAARSRTSYLDq |
| M209-C11 | 96.2 | 0.14 | RTSQFVNSNYLA | GASSRAT | QQSSRTPWT | HYLMT | YISPSGGHTIYADSVKG | VGQGIRGRSRTSYFAq |
| M206-H08 | 96.0 | 0.17 | RTSQFVNSNYLA | GASSRAT | QQSSRTPWT | DYMMA | SIVPSGGHTHYADSVKG | VARGIAARSRTSYFDY |
| M210-C12 | 95.6 | 0.16 | RTSQFVNSNYLA | GASSRAT | QQSSRTPWT | HYLMT | YISPSGGHTIYADSVKG | VAQGIAARSRTSSVDq |
| M208-F04 | 95.4 | 0.2 | RTSQFVNSNYLA | GASSRAT | QQSSRTPWT | HYLMT | YISPSGGHTIYADSVKG | VARGIAARSRTSFFDY |
| M206-B10 | 94.7 | 0.3 | RTSQFVNSNYLA | GASSRAT | QQSSRTPWT | qYLMA | SIYPSGGWTKYADSVKG | VARGIAARSRTSYFDY |
| M208-H02 | 94.4 | 0.2 | RTSQFVNSNYLA | GASSRAT | QQSSRTPWT | HYLMT | YISPSGGHTIYADSVKG | VARGIASRSRTRYCDY |
| M210-G04 | 94.2 | 0.3 | RTSQFVNSNYLA | GASSRAT | QQSSRTPWT | HYLMT | YISPSGGHTIYADSVKG | VATGIVARSRTRYFDq |
| M210-H06 | 93.8 | 0.2 | RTSQFVNSNYLA | GASSRAT | QQSSRTPWT | HYLMT | YISPSGGHTIYADSVKG | VARGIAARSRTRYFDY |
| M208-E10 | 93.7 | 0.09 | RTSQFVNSNYLA | GASSRAT | QQSSRTPWT | HYLMT | YISPSGGHTIYADSVKG | VAQGISARSRTSYFDY |
| M209-B09 | 93.5 | 0.2 | RTSQFVNSNYLA | GASSRAT | QQSSRTPWT | HYLMT | YISPSGGHTIYADSVKG | VAQGIVARSRTSYLHq |
| M209-C12 | 93.4 | | RTSQFVNSNYLA | GASSRAT | QQSSRTPWT | HYLMT | YISPSGGHTIYADSVKG | VGRGIAARSRTSqLDY |
| M208-G03 | 93.4 | 0.3 | RTSQFVNSNYLA | GASSRAT | QQSSRTPWT | HYLMT | YISPSGGHTIYADSVKG | VARGIAARSRTSYLDY |
| M206-A06 | 93.0 | | RTSQFVNSNYLA | GASSRAT | QQSSRTPWT | NYMMG | SISPSGGLTKYADSVKG | VARGIAARSRTSYFDY |
| M210-H07 | 92.8 | 0.4 | RTSQFVNSNYLA | GASSRAT | QQSSRTPWT | HYLMT | YISPSGGHTIYADSVKG | VARGIAARSRTRYFDq |
| M206-F01 | 92.6 | 0.2 | RTSQFVNSNYLA | GASSRAT | QQSSRTPWT | GYMMV | RISPSGGPTIYADSVKG | VARGIAARSRTSYFDY |
| M208-F10 | 92.5 | 0.2 | RTSQFVNSNYLA | GASSRAT | QQSSRTPWT | HYLMT | YISPSGGHTIYADSVKG | VARGIAARSRTSYFDq |
| M209-E02 | 92.4 | 0.3 | RTSQFVNSNYLA | GASSRAT | QQSSRTPWT | HYLMT | YISPSGGHTIYADSVKG | VARGIAARSRTILLDq |
| M208-C06 | 91.7 | 0.4 | RTSQFVNSNYLA | GASSRAT | QQSSRTPWT | HYLMT | YISPSGGHTIYADSVKG | VARGIAARSRTSFIDY |
| M205-D04 | 91.5 | 0.4 | RTSQFVNSNYLA | GASSRAT | QQSSRTPWT | TYKMq | SISPSGGPTNYADSVKG | VARGIAARSRTSYFDY |
| M210-G10 | 91.2 | 0.4 | RTSQFVNSNYLA | GASSRAT | QQSSRTPWT | HYLMT | YISPSGGHTIYADSVKG | VARGIAARSRTSYLDF |
| M207-A04 | 90.9 | | RTSQFVNSNYLA | GASSRAT | QQSSRTPWT | HYLMT | YISPSGGHTIYADSVKG | VARGIAARSRTRSFDY |
| M210-B02 | 90.9 | 0.2 | RTSQFVNSNYLA | GASSRAT | QQSSRTPWT | HYLMT | YISPSGGHTIYADSVKG | VARGIAARSRTSYFNq |
| M208-B01 | 90.1 | | RTSQFVNSNYLA | GASSRAT | QQSSRTPWT | HYLMT | YISPSGGHTIYADSVKG | VARGIAARSRTSFFDq |
| M209-G07 | 89.8 | | RTSQFVNSNYLA | GASSRAT | QQSSRTPWT | HYLMT | YISPSGGHTIYADSVKG | VARGIAARSRTSYFDT |
| M204-A02 | 89.5 | | RTSQFVNSNYLA | GASSRAT | QQSSRTPWT | DYMMT | YISPSGGLTSYADSVKG | VARGIAARSRTSYFDY |
| M206-H01 | 87.6 | | RTSQFVNSNYLA | GASSRAT | QQSSRTPWT | EYMMV | RISPSGGTTEYADSVKG | VARGIAARSRTSYFDY |
| M209-B11 | 87.3 | | RTSQFVNSNYLA | GASSRAT | QQSSRTPWT | HYLMT | YISPSGGHTIYADSVKG | VARGIAARSRTRYIDq |
| M206-F09 | 86.8 | | RTSQFVNSNYLA | GASSRAT | QQSSRTPWT | VYMMS | SIVPSGGSTTYADSVKG | VARGIAARSRTSYFDY |
| M209-C02 | 86.8 | | RTSQFVNSNYLA | GASSRAT | QQSSRTPWT | HYLMT | YISPSGGHTIYADSVKG | VARGIAYRRRTSYFDY |
| M208-G02 | 86.7 | | RTSQFVNSNYLA | GASSRAT | QQSSRTPWT | HYLMT | YISPSGGHTIYADSVKG | VARGIADRSRTSYSDY |
| M205-C11 | 86.5 | | RTSQFVNSNYLA | GASSRAT | QQSSRTPWT | QYMMM | RISPSGGSTLYADSVKG | VARGIAARSRTSYFDY |
| M205-H08 | 85.9 | | RTSQFVNSNYLA | GASSRAT | QQSSRTPWT | DYMMM | SIVPSGGHTqYADSVKG | VARGIAARSRTSYFDY |
| M210-H01 | 85.5 | | RTSQFVNSNYLA | GASSRAT | QQSSRTPWT | HYLMT | YISPSGGHTIYADSVKG | VARGIAARSRNSqQDY |
| M209-D12 | 85.4 | | RTSQFVNSNYLA | GASSRAT | QQSSRTPWT | HYLMT | YISPSGGHTIYADSVKG | VARGIAARSRTSYFDq |
| M209-H09 | 85.3 | | RTSQFVNSNYLA | GASSRAT | QQSSRTPWT | HYLMT | YISPSGGHTIYADSVKG | VARGIAARSRTVYFDH |
| M204-E12 | 84.1 | | RTSQFVNSNYLA | GASSRAT | QQSSRTPWT | TYMMq | YIGPSGGKTDYADSVKG | VARGIAARSRTSYFDY |
| M209-H03 | 82.6 | | RTSQFVNSNYLA | GASSRAT | QQSSRTPWT | HYLMT | YISPSGGHTIYADSVKG | VAQGIAARSRTTqFDY |
| M206-H05 | 82.5 | | RTSQFVNSNYLA | GASSRAT | QQSSRTPWT | GYKMq | SISPSGGITMYADSVKG | VARGIAARSRTSYFDY |
| M209-D03 | 80.4 | | RTSQFVNSNYLA | GASSRAT | QQSSRTPWT | HYLMT | YISPSGGHTIYADSVKG | VGRGIAARSRTSFFDq |
| M205-A02 | 80.3 | | RTSQFVNSNYLA | GASSRAT | QQSSRTPWT | TYLMA | GIVSSGGRTLYADSVKG | VARGIAARSRTSYFDY |
| M208-A10 | 78.5 | | RTSQFVNSNYLA | GASSRAT | QQSSRTPWT | HYLMT | YISPSGGHTIYADSVKG | VARGIAARSRTSqFDH |
| M205-E11 | 78.2 | | RTSQFVNSNYLA | GASSRAT | QQSSRTPWT | NYTMG | SISPSGGKTDYADSVKG | VARGIAARSRTSYFDY |
| M206-E02 | 77.6 | | RTSQFVNSNYLA | GASSRAT | QQSSRTPWT | EYMMM | VISPSGGQTHYADSVKG | VARGIAARSRTSYFDY |
| M205-H01 | 77.1 | | RTSQFVNSNYLA | GASSRAT | QQSSRTPWT | NYTMQ | YISPSGGYTGYADSVKG | VARGIAARSRTSYFDY |
| M207-A02 | 76.6 | | RTSQFVNSNYLA | GASSRAT | QQSSRTPWT | HYLMT | YISPSGGHTIYADSVKG | VARGIAARSRTINLDY |
| M209-H07 | 76.1 | | RTSQFVNSNYLA | GASSRAT | QQSSRTPWT | HYLMT | YISPSGGHTIYADSVKG | VARGIAARqRTSYYDY |
| M209-G01 | 74.8 | | RTSQFVNSNYLA | GASSRAT | QQSSRTPWT | HYLMT | YISPSGGHTIYADSVKG | VAqGISGRSRLSYVDY |
| M210-A06 | 74.8 | | RTSQFVNSNYLA | GASSRAT | QQSSRTPWT | HYLMT | YISPSGGHTIYADSVKG | VARGIAARSRTSqFDY |
| M209-D02 | 74.7 | | RTSQFVNSNYLA | GASSRAT | QQSSRTPWT | HYLMT | YISPSGGHTIYADSVKG | VARGITARSRTSYFDD |
| M205-B04 | 71.1 | | RTSQFVNSNYLA | GASSRAT | QQSSRTPWT | NYDMI | SISSSGGTTKYADSVKG | VARGIAARSRTSYFDY |
| M203-A03 | 69.1 | | RTSQFVNSNYLA | GASSRAT | QQSSRTPWT | VYMMI | SISPSGGQTTYADSVKG | VARGIAARSRTSYFDY |
| M209-E03 | 68.8 | | RTSQFVNSNYLA | GASSRAT | QQSSRTPWT | HYLMT | YISPSGGHTIYADSVKG | qARGIAARSRTSYFDY |
| M207-A01 | 67.2 | | RTSQFVNSNYLA | GASSRAT | QQSSRTPWT | HYLMT | YISPSGGHTIYADSVKG | VARGISARSRTSCFDY |
| M206-C03 | 65.5 | | RTSQFVNSNYLA | GASSRAT | QQSSRTPWT | qYMMV | SIYSSGGNTPYADSVKG | VARGIAARSRTSYFDY |
| M207-C05 | 61.4 | | RTSQFVNSNYLA | GASSRAT | QQSSRTPWT | HYLMT | YISPSGGHTIYADSVKG | VGRGIAARSRTSYFDK |
| M205-A12 | 58.8 | | RTSQFVNSNYLA | GASSRAT | QQSSRTPWT | QYDMI | YISSSGGFTRYADSVKG | VARGIAARSRTSYFDY |
| M205-F03 | 58.6 | | RTSQFVNSNYLA | GASSRAT | QQSSRTPWT | SqQMV | YISPSGGNTYYADSVKG | VARGIAARSRTSYFDY |
| M203-A01 | 51.4 | | RTSQFVNSNYLA | GASSRAT | QQSSRTPWT | NYLMA | WIVPSGGYTEYADSVKG | VARGIAARSRTSYFDY |
| M209-B01 | 47.0 | | RTSQFVNSNYLA | GASSRAT | QQSSRTPWT | HYLMT | YISPSGGHTIYADSVKG | VARGIVARSRTSNFDq |
| M208-D12 | 43.7 | | RTSQFVNSNYLA | GASSRAT | QQSSRTPWT | HYLMT | YISPSGGHTIYADSVKG | LARGIAARSRTSYqDI |
| M206-H04 | 19.0 | | RTSQFVNSNYLA | GASSRAT | QQSSRTPWT | SYMMV | SISPSGGYTIqADSVKG | VARGIAARSRTSYFDY |

[0875] Amino acid sequences of light chain (LC) and heavy chain (HC) variable domain of pKal antibodies obtained from CDR1/2 and CDR3 spiking affinity maturation libraries based on X63-G06.

| M203-A01 LC | |
|---|---|
| QDIQMTQSPG TLSLSPGERA TLSCRTSQFV NSNYLAWYQQ TPGQAPRLLI YGASSRATGI | 60 |
| PDRFSGTGYG TDFTLTISRL EPEDYGTYYC QQSSRTPWTF GQGTRVEIK | 109 |
| M203-A01 HC | |
| EVQLLESGGG LVQPGGSLRL SCAASGFTFS NYLMAWVRQA PGKGLEWVSW IVPSGGYTEY | 60 |
| ADSVKGRFTI SRDNSKNTLY LQMNSLRAED TAVYYCARVA RGIAARSRTS YFDYWGQGTL | 120 |
| VTVSSASTKG PSVFPLAPSS KS | 142 |
| M203-A03 LC | |
| QDIQMTQSPG TLSLSPGERA TLSCRTSQFV NSNYLAWYQQ TPGQAPRLLI YGASSRATGI | 60 |
| PDRFSGTGYG TDFTLTISRL EPEDYGTYYC QQSSRTPWTF GQGTRVEIK | 109 |
| M203-A03 HC | |
| EVQLLESGGG LVQPGGSLRL SCAASGFTFS VYMMIWVRQA PGKGLEWVSS ISPSGGQTTY | 60 |
| ADSVKGRFTI SRDNSKNTLY LQMNSLRAED TAVYYCARVA RGIAARSRTS YFDYWGQGTL | 120 |
| VTVSSASTKG PSVFPLAPSS KS | 142 |
| M204-A02 LC | |
| QDIQMTQSPG TLSLSPGERA TLSCRTSQFV NSNYLAWYQQ TPGQAPRLLI YGASSRATGI | 60 |
| PDRFSGTGYG TDFTLTISRL EPEDYGTYYC QQSSRTPWTF GQGTRVEIK | 109 |
| M204-A02 HC | |
| EVQLLESGGG LVQPGGSLRL SCAASGFTFS DYMMTWVRQA PGKGLqWVSY ISPSGGLTSY | 60 |
| ADSVKGRFTI SRDNSKNTLY LQMNSLRAED TAVYYCARVA RGIAARSRTS YFDYWGQGTL | 120 |
| VTVSSASTKG PSVFPLAPSS KS | 142 |
| M204-E12 LC | |
| QDIQMTQSPG TLSLSPGERA TLSCRTSQFV NSNYLAWYQQ TPGQAPRLLI YGASSRATGI | 60 |
| PDRFSGTGYG TDFTLTISRL EPEDYGTYYC QQSSRTPWTF GQGTRVEIK | 109 |
| M204-E12 HC | |
| EVQLLESGGG LVQPGGSLRL SCAASGFTFS TYMMqWVRQA PGKGLEWVSY IGPSGGKTDY | 60 |
| ADSVKGRFTI SRDNSKNTLY LQMNSLRAED TAVYYCARVA RGIAARSRTS YFDYWGQGTL | 120 |
| VTVSSASTKG PSVFPLAPSS KS | 142 |
| M205-A02 LC | |
| QDIQMTQSPG TLSLSPGERA TLSCRTSQFV NSNYLAWYQQ TPGQAPRLLI YGASSRATGI | 60 |
| PDRFSGTGYG TDFTLTISRL EPEDYGTYYC QQSSRTPWTF GQGTRVEIK | 109 |
| M205-A02 HC | |
| EVQLLESGGG LVQPGGSLRL SCAASGFTFS TYLMAWVRQA PGKGLEWVSG IVSSGGRTLY | 60 |
| ADSVKGRFTI SRDNSKNTLY LQMNSLRAED TAVYYCARVA RGIAARSRTS YFDYWGQGTL | 120 |
| VTVSSASTKG PSVFPLAPSS KS | 142 |
| M205-A12 LC | |
| QDIQMTQSPG TLSLSPGERA TLSCRTSQFV NSNYLAWYQQ TPGQAPRLLI YGASSRATGI | 60 |
| PDRFSGTGYG TDFTLTISRL EPEDYGTYYC QQSSRTPWTF GQGTRVEIK | 109 |
| M205-A12 HC | |
| EVQLLESGGG LVQPGGSLRL SCAASGFTFS QYDMIWVRQA PGKGLEWVSY ISSSGGFTRY | 60 |
| ADSVKGRFTI SRDNSKNTLY LQMNSLRAED TAVYYCARVA RGIAARSRTS YFDYWGQGTL | 120 |
| VTVSSASTKG PSVFPLAPSS KS | 142 |
| M205-B04 LC | |
| QDIQMTQSPG TLSLSPGERA TLSCRTSQFV NSNYLAWYQQ TPGQAPRLLI YGASSRATGI | 60 |
| PDRFSGTGYG TDFTLTISRL EPEDYGTYYC QQSSRTPWTF GQGTRVEIK | 109 |
| M205-B04 HC | |
| EVQLLESGGG LVQPGGSLRL SCAASGFTFS NYDMIWVRQA PGKGLEWVSS ISSSGGTTKY | 60 |
| ADSVKGRFTI SRDNSKNTLY LQMNSLRAED TAVYYCARVA RGIAARSRTS YFDYWGQGTL | 120 |
| VTVSSASTKG PSVFPLAPSS KS | 142 |
| M205-C11 LC | |
| QDIQMTQSPG TLSLSPGERA TLSCRTSQFV NSNYLAWYQQ TPGQAPRLLI YGASSRATGI | 60 |
| PDRFSGTGYG TDFTLTISRL EPEDYGTYYC QQSSRTPWTF GQGTRVEIK | 109 |
| M205-C11 HC | |
| EVQLLESGGG LVQPGGSLRL SCAASGFTFS QYMMMWVRQA PGKGLEWVSR ISPSGGSTLY | 60 |
| ADSVKGRFTI SRDNSKNTLY LQMNSLRAED TAVYYCARVA RGIAARSRTS YFDYWGQGTL | 120 |
| VTVSSASTKG PSVFPLAPSS KS | 142 |
| M205-D04 LC | |
| QDIQMTQSPG TLSLSPGERA TLSCRTSQFV NSNYLAWYQQ TPGQAPRLLI YGASSRATGI | 60 |
| PDRFSGTGYG TDFTLTISRL EPEDYGTYYC QQSSRTPWTF GQGTRVEIK | 109 |
| M205-D04 HC | |
| EVQLLESGGG LVQPGGSLRL SCAASGFTFS TYKMqWVRQA PGKGLEWVSS ISPSGGPTNY | 60 |
| ADSVKGRFTI SRDNSKNTLY LQMNSLRAED TAVYYCARVA RGIAARSRTS YFDYWGQGTL | 120 |
| VTVSSASTKG PSVFPLAPSS KS | 142 |
| M205-E11 LC | |
| QDIQMTQSPG TLSLSPGERA TLSCRTSQFV NSNYLAWYQQ TPGQAPRLLI YGASSRATGI | 60 |
| PDRFSGTGYG TDFTLTISRL EPEDYGTYYC QQSSRTPWTF GQGTRVEIK | 109 |
| M205-E11 HC | |
| EVQLLESGGG LVQPGGSLRL SCAASGFTFS NYTMGWVRQA PGKGLEWVSS ISPSGGKTDY | 60 |
| ADSVKGRFTI SRDNSKNTLY LQMNSLRAED TAVYYCARVA RGIAARSRTS YFDYWGQGTL | 120 |
| VTVSSASTKG PSVFPLAPSS KS | 142 |
| M205-F03 LC | |
| QDIQMTQSPG TLSLSPGERA TLSCRTSQFV NSNYLAWYQQ TPGQAPRLLI YGASSRATGI | 60 |
| PDRFSGTGYG TDFTLTISRL EPEDYGTYYC QQSSRTPWTF GQGTRVEIK | 109 |
| M205-F03 HC | |
| EVQLLESGGG LVQPGGSLRL SCAASGFTFS SqQMVWVRQA PGKGLEWVSY ISPSGGNTYY | 60 |
| ADSVKGRFTI SRDNSKNTLY LQMNSLRAED TAVYYCARVA RGIAARSRTS YFDYWGQGTL | 120 |
| VTVSSASTKG PSVFPLAPSS KS | 142 |
| M205-H01 LC | |
| QDIQMTQSPG TLSLSPGERA TLSCRTSQFV NSNYLAWYQQ TPGQAPRLLI YGASSRATGI | 60 |
| PDRFSGTGYG TDFTLTISRL EPEDYGTYYC QQSSRTPWTF GQGTRVEIK | 109 |
| M205-H01 HC | |
| EVQLLESGGG LVQPGGSLRL SCAASGFTFS NYTMQWVRQA PGKGLqWVSY ISPSGGYTGY | 60 |
| ADSVKGRFTI SRDNSKNTLY LQMNSLRAED TAVYYCARVA RGIAARSRTS YFDYWGQGTL | 120 |
| VTVSSASTKG PSVFPLAPSS KS | 142 |
| M205-H08 LC | |
| QDIQMTQSPG TLSLSPGERA TLSCRTSQFV NSNYLAWYQQ TPGQAPRLLI YGASSRATGI | 60 |
| PDRFSGTGYG TDFTLTISRL EPEDYGTYYC QQSSRTPWTF GQGTRVEIK | 109 |
| M205-H08 HC | |
| EVQLLESGGG LVQPGGSLRL SCAASGFTFS DYMMMWVRQA PGKGLEWVSS IVPSGGHTqY | 60 |
| ADSVKGRFTI SRDNSKNTLY LQMNSLRAED TAVYYCARVA RGIAARSRTS YFDYWGQGTL | 120 |
| VTVSSASTKG PSVFPLAPSS KS | 142 |
| M206-A06 LC | |
| QDIQMTQSPG TLSLSPGERA TLSCRTSQFV NSNYLAWYQQ TPGQAPRLLI YGASSRATGI | 60 |
| PDRFSGTGYG TDFTLTISRL EPEDYGTYYC QQSSRTPWTF GQGTRVEIK | 109 |
| M206-A06 HC | |
| EVQLLESGGG LVQPGGSLRL SCAASGFTFS NYMMGWVRQA PGKGLqWVSS ISPSGGLTKY | 60 |
| ADSVKGRFTI SRDNSKNTLY LQMNSLRAED TAVYYCARVA RGIAARSRTS YFDYWGQGTL | 120 |
| VTVSSASTKG PSVFPLAPSS KS | 142 |
| M206-B10 LC | |
| QDIQMTQSPG TLSLSPGERA TLSCRTSQFV NSNYLAWYQQ TPGQAPRLLI YGASSRATGI | 60 |
| PDRFSGTGYG TDFTLTISRL EPEDYGTYYC QQSSRTPWTF GQGTRVEIK | 109 |
| M206-B10 HC | |
| EVQLLESGGG LVQPGGSLRL SCAASGFTFS qYLMAWVRQA PGKGLEWVSS IYPSGGWTKY | 60 |
| ADSVKGRFTI SRDNSKNTLY LQMNSLRAED TAVYYCARVA RGIAARSRTS YFDYWGQGTL | 120 |
| VTVSSASTKG PSVFPLAPSS KS | 142 |
| M206-C03 LC | |
| QDIQMTQSPG TLSLSPGERA TLSCRTSQFV NSNYLAWYQQ TPGQAPRLLI YGASSRATGI | 60 |
| PDRFSGTGYG TDFTLTISRL EPEDYGTYYC QQSSRTPWTF GQGTRVEIK | 109 |
| M206-C03 HC | |
| EVQLLESGGG LVQPGGSLRL SCAASGFTFS qYMMVWVRQA PGKGLEWVSS IYSSGGNTPY | 60 |
| ADSVKGRFTI SRDNSKNTLY LQMNSLRAED TAVYYCARVA RGIAARSRTS YFDYWGQGTL | 120 |
| VTVSSASTKG PSVFPLAPSS KS | 142 |
| M206-E02 LC | |
| QDIQMTQSPG TLSLSPGERA TLSCRTSQFV NSNYLAWYQQ TPGQAPRLLI YGASSRATGI | 60 |
| PDRFSGTGYG TDFTLTISRL EPEDYGTYYC QQSSRTPWTF GQGTRVEIK | 109 |
| M206-E02 HC | |
| EVQLLESGGG LVQPGGSLRL SCAASGFTFS EYMMMWVRQA PGKGLEWVSV ISPSGGQTHY | 60 |
| ADSVKGRFTI SRDNSKNTLY LQMNSLRAED TAVYYCARVA RGIAARSRTS YFDYWGQGTL | 120 |
| VTVSSASTKG PSVFPLAPSS KS | 142 |
| M206-F01 LC | |
| QDIQMTQSPG TLSLSPGERA TLSCRTSQFV NSNYLAWYQQ TPGQAPRLLI YGASSRATGI | 60 |
| PDRFSGTGYG TDFTLTISRL EPEDYGTYYC QQSSRTPWTF GQGTRVEIK | 109 |
| M206-F01 HC | |
| EVQLLESGGG LVQPGGSLRL SCAASGFTFS GYMMVWVRQA PGKGLEWVSR ISPSGGPTIY | 60 |
| ADSVKGRFTI SRDNSKNTLY LQMNSLRAED TAVYYCARVA RGIAARSRTS YFDYWGQGTL | 120 |
| VTVSSASTKG PSVFPLAPSS KS | 142 |
| M206-F09 LC | |
| QDIQMTQSPG TLSLSPGERA TLSCRTSQFV NSNYLAWYQQ TPGQAPRLLI YGASSRATGI | 60 |
| PDRFSGTGYG TDFTLTISRL EPEDYGTYYC QQSSRTPWTF GQGTRVEIK | 109 |
| M206-F09 HC | |
| EVQLLESGGG LVQPGGSLRL SCAASGFTFS VYMMSWVRQA PGKGLEWVSS IVPSGGSTTY | 60 |
| ADSVKGRFTI SRDNSKNTLY LQMNSLRAED TAVYYCARVA RGIAARSRTS YFDYWGQGTL | 120 |
| VTVSSASTKG PSVFPLAPSS KS | 142 |
| M206-H01 LC | |
| QDIQMTQSPG TLSLSPGERA TLSCRTSQFV NSNYLAWYQQ TPGQAPRLLI YGASSRATGI | 60 |
| PDRFSGTGYG TDFTLTISRL EPEDYGTYYC QQSSRTPWTF GQGTRVEIK | 109 |
| M206-H01 HC | |
| EVQLLESGGG LVQPGGSLRL SCAASGFTFS EYMMVWVRQA PGKGLEWVSR ISPSGGTTEY | 60 |
| ADSVKGRFTI SRDNSKNTLY LQMNSLRAED TAVYYCARVA RGIAARSRTS YFDYWGQGTL | 120 |
| VTVSSASTKG PSVFPLAPSS KS | 142 |
| M206-H04 LC | |
| QDIQMTQSPG TLSLSPGERA TLSCRTSQFV NSNYLAWYQQ TPGQAPRLLI YGASSRATGI | 60 |
| PDRFSGTGYG TDFTLTISRL EPEDYGTYYC QQSSRTPWTF GQGTRVEIK | 109 |
| M206-H04 HC | |
| EVQLLESGGG LVQPGGSLRL SCAASGFTFS SYMMVWVRQA PGKGLEWVSS ISPSGGYTIq | 60 |
| ADSVKGRFTI SRDNSKNTLY LQMNSLRAED TAVYYCARVA RGIAARSRTS YFDYWGQGTL | 120 |
| VTVSSASTKG PSVFPLAPSS KS | 142 |
| M206-H05 LC | |
| QDIQMTQSPG TLSLSPGERA TLSCRTSQFV NSNYLAWYQQ TPGQAPRLLI YGASSRATGI | 60 |
| PDRFSGTGYG TDFTLTISRL EPEDYGTYYC QQSSRTPWTF GQGTRVEIK | 109 |
| M206-H05 HC | |
| EVQLLESGGG LVQPGGSLRL SCAASGFTFS GYKMqWVRQA PGKGLEWVSS ISPSGGITMY | 60 |
| ADSVKGRFTI SRDNSKNTLY LQMNSLRAED TAVYYCARVA RGIAARSRTS YFDYWGQGTL | 120 |
| VTVSSASTKG PSVFPLAPSS KS | 142 |
| M206-H08 LC | |
| QDIQMTQSPG TLSLSPGERA TLSCRTSQFV NSNYLAWYQQ TPGQAPRLLI YGASSRATGI | 60 |
| PDRFSGTGYG TDFTLTISRL EPEDYGTYYC QQSSRTPWTF GQGTRVEIK | 109 |
| M206-H08 HC | |
| EVQLLESGGG LVQPGGSLRL SCAASGFTFS DYMMAWVRQA PGKGLEWVSS IVPSGGHTHY | 60 |
| ADSVKGRFTI SRDNSKNTLY LQMNSLRAED TAVYYCARVA RGIAARSRTS YFDYWGQGTL | 120 |
| VTVSSASTKG PSVFPLAPSS KS | 142 |
| M207-A01 LC | |
| QDIQMTQSPG TLSLSPGERA TLSCRTSQFV NSNYLAWYQQ TPGQAPRLLI YGASSRATGI | 60 |
| PDRFSGTGYG TDFTLTISRL EPEDYGTYYC QQSSRTPWTF GQGTRVEIK | 109 |
| M207-A01 HC | |
| EVQLLESGGG LVQPGGSLRL SCAASGFTFS HYLMTWVRQA PGKGLEWVSY ISPSGGHTIY | 60 |
| ADSVKGRFTI SRDNSKNTLY LQMNSLRAED TAVYYCARVA RGISARSRTS CFDYWGQGTL | 120 |
| VTVSSASTKG PSVFPLAPSS KS | 142 |
| M207-A02 LC | |
| QDIQMTQSPG TLSLSPGERA TLSCRTSQFV NSNYLAWYQQ TPGQAPRLLI YGASSRATGI | 60 |
| PDRFSGTGYG TDFTLTISRL EPEDYGTYYC QQSSRTPWTF GQGTRVEIK | 109 |
| M207-A02 HC | |
| EVQLLESGGG LVQPGGSLRL SCAASGFTFS HYLMTWVRQA PGKGLEWVSY ISPSGGHTIY | 60 |
| ADSVKGRFTI SRDNSKNTLY LQMNSLRAED TALYYCARVA RGIAARSRTI NLDYWGQGTL | 120 |
| VTVSSASTKG PSVFPLAPSS KS | 142 |
| M207-A04 LC | |
| QDIQMTQSPG TLSLSPGERA TLSCRTSQFV NSNYLAWYQQ TPGQAPRLLI YGASSRATGI | 60 |
| PDRFSGTGYG TDFTLTISRL EPEDYGTYYC QQSSRTPWTF GQGTRVEIK | 109 |
| M207-A04 HC | |
| EVQLLESGGG LVQPGGSLRL SCAASGFTFS HYLMTWVRQA PGKGLEWVSY ISPSGGHTIY | 60 |
| ADSVKGRFTI SRDNSKNTLY LQMNSLRAED TAVYYCARVA RGIAARSRTR SFDYWGQGTL | 120 |
| VTVSSASTKG PSVFPLAPSS KS | 142 |
| M207-C05 LC | |
| QDIQMTQSPG TLSLSPGERA TLSCRTSQFV NSNYLAWYQQ TPGQAPRLLI YGASSRATGI | 60 |
| PDRFSGTGYG TDFTLTISRL EPEDYGTYYC QQSSRTPWTF GQGTRVEIK | 109 |
| R0121-D02 = M0207-C05 HC | |
| EVQLLESGGG LVQPGGSLRL SCAASGFTFS HYLMTWVRQA PGKGLEWVSY ISPSGGHTIY | 60 |
| ADSVKGRFTI SRDNSKNTLY LQMNSLRAED TAVYYCARVG RGIAARSRTS YFDKWGQGTL | 120 |
| VTVSSASTKG PSVFPLAPSS KS | 142 |
| M208-A10 LC | |
| QDIQMTQSPG TLSLSPGERA TLSCRTSQFV NSNYLAWYQQ TPGQAPRLLI YGASSRATGI | 60 |
| PDRFSGTGYG TDFTLTISRL EPEDYGTYYC QQSSRTPWTF GQGTRVEIK | 109 |
| M208-A10 HC | |
| EVQLLESGGG LVQPGGSLRL SCAASGFTFS HYLMTWVRQA PGKGLEWVSY ISPSGGHTIY | 60 |
| ADSVKGRFTI SRDNSKNTLY LQMNSLRAED TAVYYCARVA RGIAARSRTS qFDHWGQGTL | 120 |
| VTVSSASTKG PSVFPLAPSS KS | 142 |
| M208-B01 LC | |
| QDIQMTQSPG TLSLSPGERA TLSCRTSQFV NSNYLAWYQQ TPGQAPRLLI YGASSRATGI | 60 |
| PDRFSGTGYG TDFTLTISRL EPEDYGTYYC QQSSRTPWTF GQGTRVEIK | 109 |
| M208-B01 HC | |
| EVQLLESGGG LVQPGGSLRL SCAASGFTFS HYLMTWVRQA PGKGLEWVSY ISPSGGHTIY | 60 |
| ADSVKGRFTI SRDNSKNTLY LQMNSLRAED TAVYYCARVA RGIAARSRTS FFDqWGQGTL | 120 |
| VTVSSASTKG PSVFPLAPSS KS | 142 |
| M208-C06 LC | |
| QDIQMTQSPG TLSLSPGERA TLSCRTSQFV NSNYLAWYQQ TPGQAPRLLI YGASSRATGI | 60 |
| PDRFSGTGYG TDFTLTISRL EPEDYGTYYC QQSSRTPWTF GQGTRVEIK | 109 |
| M208-C06 HC | |
| EVQLLESGGG LVQPGGSLRL SCAASGFTFS HYLMTWVRQA PGKGLEWVSY ISPSGGHTIY | 60 |
| ADSVKGRFTI SRDNSKNTLY LQMNSLRAED TAVYYCARVA RGIAARSRTS FIDYWGQGTL | 120 |
| VTVSSASTKG PSVFPLAPSS KS | 142 |
| M208-D12 LC | |
| QDIQMTQSPG TLSLSPGERA TLSCRTSQFV NSNYLAWYQQ TPGQAPRLLI YGASSRATGI | 60 |
| PDRFSGTGYG TDFTLTISRL EPEDYGTYYC QQSSRTPWTF GQGTRVEIK | 109 |
| M208-D12 HC | |
| EVQLLESGGG LVQPGGSLRL SCAASGFTFS HYLMTWVRQA PGKGLEWVSY ISPSGGHTIY | 60 |
| ADSVKGRFTI SRDNSKNTLY LQMNSLRAED TAVYYCARLA RGIAARSRTS YqDIWGQGTL | 120 |
| VTVSSASTKG PSVFPLAPSS KS | 142 |
| M208-E10 LC | |
| QDIQMTQSPG TLSLSPGERA TLSCRTSQFV NSNYLAWYQQ TPGQAPRLLI YGASSRATGI | 60 |
| PDRFSGTGYG TDFTLTISRL EPEDYGTYYC QQSSRTPWTF GQGTRVEIK | 109 |
| M208-E10 HC | |
| EVQLLESGGG LVQPGGSLRL SCAASGFTFS HYLMTWVRQA PGKGLEWVSY ISPSGGHTIY | 60 |
| ADSVKGRFTI SRDNSKNTLY LQMNSLRAED TAVYYCARVA QGISARSRTS YFDYWGQGTL | 120 |
| VTVSSASTKG PSVFPLAPSS KS | 142 |
| M208-F04 LC | |
| QDIQMTQSPG TLSLSPGERA TLSCRTSQFV NSNYLAWYQQ TPGQAPRLLI YGASSRATGI | 60 |
| PDRFSGTGYG TDFTLTISRL EPEDYGTYYC QQSSRTPWTF GQGTRVEIK | 109 |
| M208-F04 HC | |
| EVQLLESGGG LVQPGGSLRL SCAASGFTFS HYLMTWVRQA PGKGLEWVSY ISPSGGHTIY | 60 |
| ADSVKGRFTI SRDNSKNTLY LQMNSLRAED TAVYYCARVA RGIAARSRTS FFDYWGQGTL | 120 |
| VTVSSASTKG PSVFPLAPSS KS | 142 |
| M208-F10 LC | |
| QDIQMTQSPG TLSLSPGERA TLSCRTSQFV NSNYLAWYQQ TPGQAPRLLI YGASSRATGI | 60 |
| PDRFSGTGYG TDFTLTISRL EPEDYGTYYC QQSSRTPWTF GQGTRVEIK | 109 |
| M208-F10 HC | |
| EVQLLESGGG LVQPGGSLRL SCAASGFTFS HYLMTWVRQA PGKGLEWVSY ISPSGGHTIY | 60 |
| ADSVKGRFTI SRDNSKNTLY LQMNSLRAED TAVYYCARVA RGIAARSRTS YFDqWGQGTL | 120 |
| VTVSSASTKG PSVFPLAPSS KS | 142 |
| M208-G02 LC | |
| QDIQMTQSPG TLSLSPGERA TLSCRTSQFV NSNYLAWYQQ TPGQAPRLLI YGASSRATGI | 60 |
| PDRFSGTGYG TDFTLTISRL EPEDYGTYYC QQSSRTPWTF GQGTRVEIK | 109 |
| M208-G02 HC | |
| EVQLLESGGG LVQPGGSLRL SCAASGFTFS HYLMTWVRQA PGKGLEWVSY ISPSGGHTIY | 60 |
| ADSVKGRFTI SRDNSKNTLY LQMNSLRAED TAVYYCARVA RGIADRSRTS YSDYWGQGTL | 120 |
| VTVSSASTKG PSVFPLAPSS KS | 142 |
| M208-G03 LC | |
| QDIQMTQSPG TLSLSPGERA TLSCRTSQFV NSNYLAWYQQ TPGQAPRLLI YGASSRATGI | 60 |
| PDRFSGTGYG TDFTLTISRL EPEDYGTYYC QQSSRTPWTF GQGTRVEIK | 109 |
| M208-G03 HC | |
| EVQLLESGGG LVQPGGSLRL SCAASGFTFS HYLMTWVRQA PGKGLEWVSY ISPSGGHTIY | 60 |
| ADSVKGRFTI SRDNSKNTLY LQMNSLRAED TAVYYCARVA RGIAARSRTS YLDYWGQGTL | 120 |
| VTVSSASTKG PSVFPLAPSS KS | 142 |
| M208-H02 LC | |
| QDIQMTQSPG TLSLSPGERA TLSCRTSQFV NSNYLAWYQQ TPGQAPRLLI YGASSRATGI | 60 |
| PDRFSGTGYG TDFTLTISRL EPEDYGTYYC QQSSRTPWTF GQGTRVEIK | 109 |
| M208-H02 HC | |
| EVQLLESGGG LVQPGGSLRL SCAASGFTFS HYLMTWVRQA PGKGLEWVSY ISPSGGHTIY | 60 |
| ADSVKGRFTI SRDNSKNTLY LQMNSLRAED TAVYYCARVA RGIASRSRTR YCDYWGQGTL | 120 |
| VTVSSASTKG PSVFPLAPSS KS | 142 |
| M209-B01 LC | |
| QDIQMTQSPG TLSLSPGERA TLSCRTSQFV NSNYLAWYQQ TPGQAPRLLI YGASSRATGI | 60 |
| PDRFSGTGYG TDFTLTISRL EPEDYGTYYC QQSSRTPWTF GQGTRVEIK | 109 |
| M209-B01 HC | |
| EVQLLESGGG LVQPGGSLRL SCAASGFTFS HYLMTWVRQA PGKGLEWVSY ISPSGGHTIY | 60 |
| ADSVKGRFTI SRDNSKNTLY LQMNSLRAED TAVYYCARVA RGIVARSRTS NFDqWGQGTL | 120 |
| VTVSSASTKG PSVFPLAPSS KS | 142 |
| M209-B09 LC | |
| QDIQMTQSPG TLSLSPGERA TLSCRTSQFV NSNYLAWYQQ TPGQAPRLLI YGASSRATGI | 60 |
| PDRFSGTGYG TDFTLTISRL EPEDYGTYYC QQSSRTPWTF GQGTRVEIK | 109 |
| M209-B09 HC | |
| EVQLLESGGG LVQPGGSLRL SCAASGFTFS HYLMTWVRQA PGKGLEWVSY ISPSGGHTIY | 60 |
| ADSVKGRFTI SRDNSKNTLY LQMNSLRAED TAVYYCARVA QGIVARSRTS YLHqWGQGTL | 120 |
| VTVSSASTKG PSVFPLAPSS KS | 142 |
| M209-B11 LC | |
| QDIQMTQSPG TLSLSPGERA TLSCRTSQFV NSNYLAWYQQ TPGQAPRLLI YGASSRATGI | 60 |
| PDRFSGTGYG TDFTLTISRL EPEDYGTYYC QQSSRTPWTF GQGTRVEIK | 109 |
| M209-B11 HC | |
| EVQLLESGGG LVQPGGSLRL SCAASGFTFS HYLMTWVRQA PGKGLEWVSY ISPSGGHTIY | 60 |
| ADSVKGRFTI SRDNSKNTLY LQMNSLRAED TAVYYCARVA RGIAARSRTR YIDqWGQGTL | 120 |
| VTVSSASTKG PSVFPLAPSS KS | 142 |
| M209-C02 LC | |
| QDIQMTQSPG TLSLSPGERA TLSCRTSQFV NSNYLAWYQQ TPGQAPRLLI YGASSRATGI | 60 |
| PDRFSGTGYG TDFTLTISRL EPEDYGTYYC QQSSRTPWTF GQGTRVEIK | 109 |
| M209-C02 HC | |
| EVQLLESGGG LVQPGGSLRL SCAASGFTFS HYLMTWVRQA PGKGLEWVSY ISPSGGHTIY | 60 |
| ADSVKGRFTI SRDNSKNTLY LQMNSLRAED TAVYYCARVA RGIAYRRRTS YFDYWGQGTL | 120 |
| VTVSSASTKG PSVFPLAPSS KS | 142 |
| M209-C11 LC | |
| QDIQMTQSPG TLSLSPGERA TLSCRTSQFV NSNYLAWYQQ TPGQAPRLLI YGASSRATGI | 60 |
| PDRFSGTGYG TDFTLTISRL EPEDYGTYYC QQSSRTPWTF GQGTRVEIK | 109 |
| M209-C11 HC | |
| EVQLLESGGG LVQPGGSLRL SCAASGFTFS HYLMTWVRQA PGKGLEWVSY ISPSGGHTIY | 60 |
| ADSVKGRFTI SRDNSKNTLY LQMNSLRAED TAVYYCAMVG QGIRGRSRTS YFAqWGQGTL | 120 |
| VTVSSASTKG PSVFPLAPSS KS | 142 |
| M209-C12 LC | |
| QDIQMTQSPG TLSLSPGERA TLSCRTSQFV NSNYLAWYQQ TPGQAPRLLI YGASSRATGI | 60 |
| PDRFSGTGYG TDFTLTISRL EPEDYGTYYC QQSSRTPWTF GQGTRVEIK | 109 |
| M209-C12 HC | |
| EVQLLESGGG LVQPGGSLRL SCAASGFTFS HYLMTWVRQA PGKGLEWVSY ISPSGGHTIY | 60 |
| ADSVKGRFTI SRDNSKNTLY LQMNSLRAED TAVYYCARVG RGIAARSRTS qLDYWGQGTL | 120 |
| VTVSSASTKG PSVFPLAPSS KS | 142 |
| M0209-D02 LC | |
| QDIQMTQSPG TLSLSPGERA TLSCRTSQFV NSNYLAWYQQ TPGQAPRLLI YGASSRATGI | 60 |
| PDRFSGTGYG TDFTLTISRL EPEDYGTYYC QQSSRTPWTF GQGTRVEIK | 109 |
| M209-D02 HC | |
| EVQLLESGGG LVQPGGSLRL SCAASGFTFS HYLMTWVRQA PGKGLEWVSY ISPSGGHTIY | 60 |
| ADSVKGRFTI SRDNSKNTLY LQMNSLRAED TAVYYCARVA RGITARSRTS YFDDWGQGTL | 120 |
| VTVSSASTKG PSVFPLAPSS KS | 142 |
| M209-D03 LC | |
| QDIQMTQSPG TLSLSPGERA TLSCRTSQFV NSNYLAWYQQ TPGQAPRLLI YGASSRATGI | 60 |
| PDRFSGTGYG TDFTLTISRL EPEDYGTYYC QQSSRTPWTF GQGTRVEIK | 109 |
| M209-D03 HC | |
| EVQLLESGGG LVQPGGSLRL SCAASGFTFS HYLMTWVRQA PGKGLEWVSY ISPSGGHTIY | 60 |
| ADSVKGRFTI SRDNSKNTLY LQMNSLRAED TAVYYCARVG RGIAARSRTS FFDqWGQGTL | 120 |
| VTVSSASTKG PSVFPLAPSS KS | 142 |
| M209-D12 LC | |
| QDIQMTQSPG TLSLSPGERA TLSCRTSQFV NSNYLAWYQQ TPGQAPRLLI YGASSRATGI | 60 |
| PDRFSGTGYG TDFTLTISRL EPEDYGTYYC QQSSRTPWTF GQGTRVEIK | 109 |
| M209-D12 HC | |
| EVQLLESGGG LVQPGGSLRL SCAASGFTFS HYLMTWVRQA PGKGLEWVSY ISPSGGHTIY | 60 |
| ADSVKGRFTI SRDNSKNTLY LQMNSLRAED TAVYYCATVA RGIAARSRTS YFDqWGQGTL | 120 |
| VTVSSASTKG PSVFPLAPSS KS | 142 |
| M209-E02 LC | |
| QDIQMTQSPG TLSLSPGERA TLSCRTSQFV NSNYLAWYQQ TPGQAPRLLI YGASSRATGI | 60 |
| PDRFSGTGYG TDFTLTISRL EPEDYGTYYC QQSSRTPWTF GQGTRVEIK | 109 |
| M209-E02 HC | |
| EVQLLESGGG LVQPGGSLRL SCAASGFTFS HYLMTWVRQA PGKGLEWVSY ISPSGGHTIY | 60 |
| ADSVKGRFTI SRDNSKNTLY LQMNSLRAED TAVYYCARVA RGIAARSRTI LLDqWGQGTL | 120 |
| VTVSSASTKG PSVFPLAPSS KS | 142 |
| M209-E03 LC | |
| QDIQMTQSPG TLSLSPGERA TLSCRTSQFV NSNYLAWYQQ TPGQAPRLLI YGASSRATGI | 60 |
| PDRFSGTGYG TDFTLTISRL EPEDYGTYYC QQSSRTPWTF GQGTRVEIK | 109 |
| M209-E03 HC | |
| EVQLLESGGG LVQPGGSLRL SCAASGFTFS HYLMTWVRQA PGKGLEWVSY ISPSGGHTIY | 60 |
| ADSVKGRFTI SRDNSKNTLY LQMNSLRAED TAVYYCARqA RGIAARSRTS YFDYWGQGTL | 120 |
| VTVSSASTKG PSVFPLAPSS KS | 142 |
| M209-F04 LC | |
| QDIQMTQSPG TLSLSPGERA TLSCRTSQFV NSNYLAWYQQ TPGQAPRLLI YGASSRATGI | 60 |
| PDRFSGTGYG TDFTLTISRL EPEDYGTYYC QQSSRTPWTF GQGTRVEIK | 109 |
| M209-F04 HC | |
| EVQLLESGGG LVQPGGSLRL SCAASGFTFS HYLMTWVRQA PGKGLEWVSY ISPSGGHTIY | 60 |
| ADSVKGRFTI SRDNSKNTLY LQMNSLRAED TAVYYCARVA RGIAARSRTS YLDqWSQGTL | 120 |
| VTVSSASTKG PSVFPLAPSS KS | 142 |
| M209-G01 LC | |
| QDIQMTQSPG TLSLSPGERA TLSCRTSQFV NSNYLAWYQQ TPGQAPRLLI YGASSRATGI | 60 |
| PDRFSGTGYG TDFTLTISRL EPEDYGTYYC QQSSRTPWTF GQGTRVEIK | 109 |
| M209-G01 HC | |
| EVQLLESGGG LVQPGGSLRL SCAASGFTFS HYLMTWVRQA PGKGLEWVSY ISPSGGHTIY | 60 |
| ADSVKGRFTI SRDNSKNTLY LQMNSLRAED TAVYYCARVA qGISGRSRLS YVDYWGQGTL | 120 |
| VTVSSASTKG PSVFPLAPSS KS | 142 |
| M209-G07 LC | |
| QDIQMTQSPG TLSLSPGERA TLSCRTSQFV NSNYLAWYQQ TPGQAPRLLI YGASSRATGI | 60 |
| PDRFSGTGYG TDFTLTISRL EPEDYGTYYC QQSSRTPWTF GQGTRVEIK | 109 |
| M209-G07 HC | |
| EVQLLESGGG LVQPGGSLRL SCAASGFTFS HYLMTWVRQA PGKGLEWVSY ISPSGGHTIY | 60 |
| ADSVKGRFTI SRDNSKNTLY LQMNSLRAED TAVYYCARVA RGIAARSRTS YFDTWGQGTL | 120 |
| VTVSSASTKG PSVFPLAPSS KS | 142 |
| M209-H03 LC | |
| QDIQMTQSPG TLSLSPGERA TLSCRTSQFV NSNYLAWYQQ TPGQAPRLLI YGASSRATGI | 60 |
| PDRFSGTGYG TDFTLTISRL EPEDYGTYYC QQSSRTPWTF GQGTRVEIK | 109 |
| M209-H03 HC | |
| EVQLLESGGG LVQPGGSLRL SCAASGFTFS HYLMTWVRQA PGKGLEWVSY ISPSGGHTIY | 60 |
| ADSVKGRFTI SRDNSKNTLY LQMNSLRAED TAVYYCARVA QGIAARSRTT qFDYWGQGTL | 120 |
| VTVSSASTKG PSVFPLAPSS KS | 142 |
| M209-H07 LC | |
| QDIQMTQSPG TLSLSPGERA TLSCRTSQFV NSNYLAWYQQ TPGQAPRLLI YGASSRATGI | 60 |
| PDRFSGTGYG TDFTLTISRL EPEDYGTYYC QQSSRTPWTF GQGTRVEIK | 109 |
| M209-H07 HC | |
| EVQLLESGGG LVQPGGSLRL SCAASGFTFS HYLMTWVRQA PGKGLEWVSY ISPSGGHTIY | 60 |
| ADSVKGRFTI SRDNSKNTLY LQMNSLRAED TAVYYCARVA RGIAARqRTS YYDYWGQGTL | 120 |
| VTVSSASTKG PSVFPLAPSS KS | 142 |
| M209-H09 LC | |
| QDIQMTQSPG TLSLSPGERA TLSCRTSQFV NSNYLAWYQQ TPGQAPRLLI YGASSRATGI | 60 |
| PDRFSGTGYG TDFTLTISRL EPEDYGTYYC QQSSRTPWTF GQGTRVEIK | 109 |
| M209-H09 HC | |
| EVQLLESGGG LVQPGGSLRL SCAASGFTFS HYLMTWVRQA PGKGLEWVSY ISPSGGHTIY | 60 |
| ADSVKGRFTI SRDNSKNTLY LQMNSLRAED TAVYYCARVA RGIAARSRTV YFDHWGQGTL | 120 |
| VTVSSASTKG PSVFPLAPSS KS | 142 |
| M210-A06 LC | |
| QDIQMTQSPG TLSLSPGERA TLSCRTSQFV NSNYLAWYQQ TPGQAPRLLI YGASSRATGI | 60 |
| PDRFSGTGYG TDFTLTISRL EPEDYGTYYC QQSSRTPWTF GQGTRVEIK | 109 |
| M210-A06 HC | |
| EVQLLESGGG LVQPGGSLRL SCAASGFTFS HYLMTWVRQA PGKGLEWVSY ISPSGGHTIY | 60 |
| ADSVKGRFTI SRDNSKNTLY LQMNSLRAED TAVYYCARVA RGIAARSRTS qFDYWGQGTL | 120 |
| VTVSSASTKG PSVFPLAPSS KS | 142 |
| M210-B02 LC | |
| QDIQMTQSPG TLSLSPGERA TLSCRTSQFV NSNYLAWYQQ TPGQAPRLLI YGASSRATGI | 60 |
| PDRFSGTGYG TDFTLTISRL EPEDYGTYYC QQSSRTPWTF GQGTRVEIK | 109 |
| M210-B02 HC | |
| EVQLLESGGG LVQPGGSLRL SCAASGFTFS HYLMTWVRQA PGKGLEWVSY ISPSGGHTIY | 60 |
| ADSVKGRFTI SRDNSKNTLY LQMNSLRAED TAVYYCASVA RGIAARSRTS YFNqWGQGTL | 120 |
| VTVSSASTKG PSVFPLAPSS KS | 142 |
| M210-C12 LC | |
| QDIQMTQSPG TLSLSPGERA TLSCRTSQFV NSNYLAWYQQ TPGQAPRLLI YGASSRATGI | 60 |
| PDRFSGTGYG TDFTLTISRL EPEDYGTYYC QQSSRTPWTF GQGTRVEIK | 109 |
| M210-C12 HC | |
| EVQLLESGGG LVQPGGSLRL SCAASGFTFS HYLMTWVRQA PGKGLEWVSY ISPSGGHTIY | 60 |
| ADSVKGRFTI SRDNSKNTLY LQMNSLRAED TAVYYCARVA QGIAARSRTS SVDqWGQGTL | 120 |
| VTVSSASTKG PSVFPLAPSS KS | 142 |
| M210-G04 LC | |
| QDIQMTQSPG TLSLSPGERA TLSCRTSQFV NSNYLAWYQQ TPGQAPRLLI YGASSRATGI | 60 |
| PDRFSGTGYG TDFTLTISRL EPEDYGTYYC QQSSRTPWTF GQGTRVEIK | 109 |
| M210-G04 HC | |
| EVQLLESGGG LVQPGGSLRL SCAASGFTFS HYLMTWVRQA PGKGLEWVSY ISPSGGHTIY | 60 |
| ADSVKGRFTI SRDNSKNTLY LQMNSLRAED TAVYYCARVA TGIVARSRTR YFDqWGQGTL | 120 |
| VTVSSASTKG PSVFPLAPSS KS | 142 |
| M210-G10 LC | |
| QDIQMTQSPG TLSLSPGERA TLSCRTSQFV NSNYLAWYQQ TPGQAPRLLI YGASSRATGI | 60 |
| PDRFSGTGYG TDFTLTISRL EPEDYGTYYC QQSSRTPWTF GQGTRVEIK | 109 |
| M210-G10 HC | |
| EVQLLESGGG LVQPGGSLRL SCAASGFTFS HYLMTWVRQA PGKGLEWVSY ISPSGGHTIY | 60 |
| ADSVKGRFTI SRDNSKNTLY LQMNSLRAED TAVYYCARVA RGIAARSRTS YLDFWGQGTL | 120 |
| VTVSSASTKG PSVFPLAPSS KS | 142 |
| M210-H01 LC | |
| QDIQMTQSPG TLSLSPGERA TLSCRTSQFV NSNYLAWYQQ TPGQAPRLLI YGASSRATGI | 60 |
| PDRFSGTGYG TDFTLTISRL EPEDYGTYYC QQSSRTPWTF GQGTRVEIK | 109 |
| M210-H01 HC | |
| EVQLLESGGG LVQPGGSLRL SCAASGFTFS HYLMTWVRQA PGKGLEWVSY ISPSGGHTIY | 60 |
| ADSVKGRFTI SRDNSKNTLY LQMNSLRAED TAVYYCARVA RGIAARSRNS qQDYWGQGTL | 120 |
| VTVSSASTKG PSVFPLAPSS KS | 142 |
| M210-H06 LC | |
| QDIQMTQSPG TLSLSPGERA TLSCRTSQFV NSNYLAWYQQ TPGQAPRLLI YGASSRATGI | 60 |
| PDRFSGTGYG TDFTLTISRL EPEDYGTYYC QQSSRTPWTF GQGTRVEIK | 109 |
| M210-H06 HC | |
| EVQLLESGGG LVQPGGSLRL SCAASGFTFS HYLMTWVRQA PGKGLEWVSY ISPSGGHTIY | 60 |
| ADSVKGRFTI SRDNSKNTLY LQMNSLRAED TAVYYCARVA RGIAARSRTR YFDYWGQGTL | 120 |
| VTVSSASTKG PSVFPLAPSS KS | 142 |
| M210-H07 LC | |
| QDIQMTQSPG TLSLSPGERA TLSCRTSQFV NSNYLAWYQQ TPGQAPRLLI YGASSRATGI | 60 |
| PDRFSGTGYG TDFTLTISRL EPEDYGTYYC QQSSRTPWTF GQGTRVEIK | 109 |
| M210-H07 HC | |
| EVQLLESGGG LVQPGGSLRL SCAASGFTFS HYLMTWVRQA PGKGLEWVSY ISPSGGHTIY | 60 |
| ADSVKGRFTI SRDNSKNTLY LQMNSLRAED TAVYYCARVA RGIAARSRTR YFDqWGQGTL | 120 |
| VTVSSASTKG PSVFPLAPSS KS | 142 |

### Example 6

### In Vivo Testing of M162-A04 (IgG) and X101-A01

[0876] Bradykinin and other bioactive kinins have been previously implicated in carrageenan-induced edema and inflammatory pain (Sharma J. N. et al. (1998) Inflammopharmacology 6, 9-17; Asano M. et al. (1997) Br J Pharmacol 122, 1436-1440; De Campos R. O. et al. (1996) Eur J Pharmacol 316, 277-286). Plasma kallikrein and tissue kallikrein 1 are the two primary kininogenases in mammals (Schmaier A.H. (2008) Int Immunopharmacol 8, 161-165). M162-A04 (M162-A4) (IgG), a specific plasma kallikrein inhibitor, was tested to determine whether it would be effective in carrageenan induced edema. The study design is outlined in Table 10. The route of administration (ROA) for the vehicle (PBS), the antibody, and the positive control (indomethacin) was intra-peritoneal (IP) and was given 30 minutes prior to carrageenan injection (0.1 mL of a 2% carrageenan solution). It is evident from FIG. 2 that antibody doses at 10 mg/kg and above were equally effective in reducing carrageenan-induced edema as the positive control (indomethacin). However, the antibody was not effective in reducing carrageenan-induced thermal hyperalgesia (FIG. 3). The reason for the dissociation between effectiveness in edema and hyperalgesia are not obvious but may be due to differences in the bioactivity of different kinin metabolites. Lys-desArg9-bradykinin is the most potent agonist of the B1 receptor, which is believed to be primarily involved in pain hypersensitivity (Leeb-Lundberg L. M et al. (2005) Pharmacol Rev 57, 27-77). This kinin metabolite is generated by tissue kallikrein 1, not plasma kallikrein (Schmaier A.H. (2008) Int Immunopharmacol 8, 161-165). This difference in kinin generation and resulting bradykinin receptor activation may account for the unexpected decoupling of edema and hyperalgesia in this model.

[0877] Another pKal antibody inhibitor X101-A01 was also tested in the CPE model using the study design shown in Table 10B. The data obtained in FIG. 14 shows that X101-A01 inhibited edema in a dose-dependent manner to an extent that is comparable to that of the positive control (indomethacin).

TABLE 10A
Carrageenan-Induced Paw Edema Study Design to test M162-A04

| | | | | | Timing | |
|---|---|---|---|---|---|---|
| | | | | | relative | |
| | | | | | to | Dose |
| | Number | | Dose | | carra- | Volume |
| Group # | of Rats | Treatment | (mg/kg) | ROA | geenan | (mL/kg) |
| 1 | 6 | Vehicle | N/A | IP | T −30 | 20 |
| | | | | | minutes | |
| 2 | 6 | 559A-M162-A4 | 3 | IP | T −30 | 20 |
| | | | | | minutes | |
| 3 | 6 | 559A-M162-A4 | 10 | IP | T −30 | 20 |
| | | | | | minutes | |
| 4 | 6 | 559A-M162-A4 | 30 | IP | T −30 | 20 |
| | | | | | minutes | |
| 5 | 6 | Indomethacin | 5 | IP | T −30 | 20 |
| | | | | | minutes | |

TABLE 10B
Carrageenan-Induced Paw Edema Study Design to Test X101-

| | | | Dose | | | Vol |
|---|---|---|---|---|---|---|
| Group | Treatment | n | (mg/Kg) | ROA | Timing * | (mL/Kg) |
| 1 | Vehicle | 10 | N/A | IP | −30 min | 20 |
| 2 | X101-A01 | 10 | 1 | IP | −30 min | 20 |
| 3 | X101-A01 | 10 | 3 | IP | −30 min | 20 |
| 4 | X101-A01 | 10 | 10 | IP | −30 min | 20 |
| 5 | X101-A01 | 10 | 30 | IP | −30 min | 20 |
| 6 | Indomethacin | 10 | 5 | IP | −30 min | 20 |

### Example 7

### Evaluation of Selected Antibody Inhibitors of Plasma Kallikrein

[0878] Evaluation of selected optimized antibodies (X81-B01 and X67-D03) is shown in Table 11. Neither antibody has any putative deamidation, isomerization, or oxidation sites.

TABLE 11

| Criteria | X81-B01 (IgG) | X67-D03 (IgG) |
|---|---|---|
| < nM Ki, app against human pKal | 0.2 nM | 0.1 nM |
| < nM Ki, app against rodent pKal | mouse - 11 pM | mouse - 0.7 nM |
| | rat - 0.14 nM | rat - 0.34 nM |
| prekallikrein binding | no | no |
| Specific inhibitor with respect | yes | yes |
| to fXIa, plasmin, and trypsin | | |
| Inhibits bradykinin generation | yes | yes |
| Inhibits pKal in presence of | yes | yes |
| prekallikrein | | |
| Competition for binding | yes | yes |
| with aprotinin | | |
| Stability in human serum | yes | nd* |

*not done; a parental form of this antibody was shown to be stable in serum

### Example 8

### Epitope Mapping

[0879] The region of pKal bound by selected anti-pKal antibodies was investigated using several methods. First, competition assays were used to determine whether the antibodies competed for binding to pKal with known active site-directed inhibitors. Second, antibodies were grouped according to whether they were inhibitors or just binders to pKal. Third, epitopes were investigated using synthetic peptides and peptidic structures based on the sequence and 3-dimensional structure of pKal. These peptidic structures are called “CLIPS” (Chemically Linked Peptides on Scaffolds) and the testing was performed by a fee for service company called Pepscan.

[0880] Fourth, antibodies were tested for their ability to inhibit pKal from other species, besides human, where the amino acid sequence of pKal has been determined in order to identify amino acids that may account for the differences in inhibition.

### Competition Assays

[0881] Using a BIACORE® SPR assay antibodies of interest were tested for competition with a known active site inhibitor of pKal. EPI-KAL2 is potent (k_{i,app}=0.1 nM) active site inhibitor of pKal and a Kunitz domain inhibitor based on the first domain of tissue factor pathway inhibitor (Markland (1996) Iterative optimization of high-affinity protease inhibitors using phage display. 2. Plasma kallikrein and thrombin. Biochemistry. 35(24):8058-67). Kunitz domains are known active site inhibitors of serine proteases, such as pKal.

[0882] The sequence of EPI-KAL2 is:

EAMHSFCAFKADDGPCRAAHPRWFFNIFTRQCEEFSYGGCGGNQNRFESL
EECKKMCTRD

[0883] (amino acids in italics are those that differ from TFPI)

[0884] As shown in FIGS. 8A-8B, the antibodies X81-B01 and X67-D03 were competed for binding to pKal in the presence or EPI-KAL2. This result indicates that these antibodies either bind in vicinity of the active site or allosteric changes in the conformation of the pKal-EPI-KAL2 complex prevent antibody binding.

[0885] Antibody Binders Vs Inhibitors

[0886] As shown in Tables 1 and 2, all the unique antibodies discovered by phage display were characterized as being either pKal inhibitors or binders but not inhibitors. Antibodies that inhibit the activity of pKal either bind near the active site and preclude substrate interactions (competitive inhibitors) or that bind away from the active site and induce allosteric changes in the structure of the active site (noncompetitive inhibitors). Antibodies that bind but do not inhibit pKal are unlikely to bind near the active site and may bind the non-catalytic domain (i.e. the apple domain). Table 12 categorizes selected antibodies as being either inhibitors or binders of pKal. Also shown in Table 12 for the listed antibodies, is a demonstration of whether they cross-react with mouse pKal as inhibitors and whether they bind prekallikrein.

TABLE 12
Binding Properties of Selected Anti-pKal Antibodies

| | | | human | mouse | CLIPS |
|---|---|---|---|---|---|
| Num- | Anti- | | Ki, app | Ki, app | Peptide(s) |
| ber | body | Binding Category | (nM) | (nM) | Identified |
| 1 | M6- | 1) Binder only | no | no | C4 |
| | A06 | | | | |
| 2 | M6- | 2) inhibitor, prekallikrein | 5.9 | 3.9 | C1, C5 |
| | D09 | binder, inhibits mouse | | | |
| | | and human pKal | | | |
| 3 | M8- | 1) Binder only | no | no | |
| | C04 | | | | |
| 4 | M8- | 1) Binder only | no | no | C1, C4, |
| | G09 | | | | C6, C7 |
| 5 | M29- | 3) inhibitor, does not | 0.7 | no | C1, C4, |
| | D09 | bind prekallikrein, does | | | C7 |
| | | not inhibit mouse pKal | | | |
| 6 | M35- | 2) inhibitor, prekallikrein | 2.9 | 8 | C1, C4 |
| | G04 | binder, inhibits mouse | | | |
| | | and human pKal | | | |
| 7 | M145- | 3) inhibitor, does not | 0.79 | 800 | C1, C4 |
| | D11 | bind prekallikrein, weak | | | |
| | | inhibitor of mouse pKal | | | |
| 8 | M160- | 4) inhibitor of both | 5 | 0.2 | C2 |
| | G12 | mouse and human pKal, | | | |
| | | does not bind | | | |
| | | prekallikrein | | | |
| 9 | X55- | 4) inhibitor of both | 0.4 | 2 | C2, C3 |
| | F01 | mouse and human pKal, | | | |
| | | does not bind | | | |
| | | prekallikrein | | | |
| 10 | X73- | 4) inhibitor, does not | 20 | 70 | C6 |
| | H09 | bind prekallikrein, | | | |
| | | weak inhibitor of | | | |
| | | human and mouse pKal | | | |
| 11 | X81- | 4) inhibitor of both | 0.1 | 0.011 | C2, C3, |
| | B01 | mouse and human pKal, | | | C5, C6 |
| | | does not bind | | | |
| | | prekallikrein | | | |
| 12 | A2 | 5) Negative control, | No | No | No |
| | | does not bind pKal, | binding | binding | binding |
| | | binds streptavidin | | | |

C1-C7: peptides in pKal identified by CLIPS epitope mapping (see FIGS. 9 and 10A-10C). C1 corresponds to positions 55-67 of the catalytic domain, C2 to positions 81-94, C3 to positions 101-108, C4 to positions 137-151, C5 to positions 162-178, C6 to positions 186-197, and C7 to positions 214-217.

[0887] Epitope Mapping Using CLIPS

[0888] The 11 anti-pKal antibodies listed in Table 12, plus one negative control (A2) were tested for binding to 5000 different synthetic CLIPS (Chemically Linked Peptides on Scaffolds) by Pepscan as described below in the CLIP METHODS sections. This analysis led to the identification of peptide regions in pKal that are likely to be a part of the antibody epitope for each of the tested antibodies (FIG. 9).

[0889] Clips Methods

[0890] The linear and CLIPS peptides were synthesized based on the amino acid sequence of the target protein using standard Fmoc-chemistry and deprotected using trifluoric acid with scavengers. The constrained peptides were synthesized on chemical scaffolds in order to reconstruct conformational epitopes, using Chemically Linked Peptides on Scaffolds (CLIPS) technology (Timmerman et al. (2007). For example, the single looped peptides were synthesized containing a dicysteine, which was cyclized by treating with alpha,alpha′-dibromoxylene and the size of the loop was varied by introducing cysteine residues at variable spacing. If other cysteines besides the newly introduced cysteines were present, they were replaced by alanine. The side-chains of the multiple cysteines in the peptides were coupled to CLIPS templates by reacting onto credit-card format polypropylene PEPSCAN cards (455 peptide formats/card) with a 0.5 mM solution of CLIPS template such as 1,3-bis(bromomethyl)benzene in ammonium bicarbonate (20 mM, pH 7.9)/acetonitrile (1:1(v/v)). The cards were gently shaken in the solution for 30 to 60 minutes while completely covered in solution. Finally, the cards were washed extensively with excess of H₂O and sonicated in distrupt-buffer containing 1 percent SDS/0.1 percent beta-mercaptoethanol in PBS (pH 7.2) at 70° C. for 30 minutes, followed by sonication in H₂O for another 45 minutes. The binding of antibody to each peptide were tested in a PEPSCAN-based ELISA. The 455-well credit card format polypropylene cards containing the covalently linked peptides were incubated with primary antibody solution for example consisting of 1 micrograms/mL diluted in blocking solution called SQ (4% horse serum, 5% ovalbumin (w/v) in PBS/1% Tween or diluted in PBS e.g., 20% SQ) overnight. After washing, the peptides were incubated with a 1/1000 dilution of rabbit anti-human antibody peroxidase or goat-anti-human FAB peroxidase for one hour at 25° C. After washing, the peroxidase substrate 2,2′-azino-di-3-ethylbenzthiazoline sulfonate (ABTS) and 2 microlitres of 3 percent H₂O₂ were added. After one hour, the color development was measured. The color development was quantified with a charge coupled device (CCD)—camera and an image processing system (as firstly described in Slootstra et al., 1996).

[0891] Data Calculation

[0892] Raw Data: Optical Density (Arbitrary OD Units)

[0893] The raw data are optical values obtained by a CCD-camera. The values mostly range from 0 to 3000, a log scale similar to 1 to 3 of a standard 96-well plate elisa-reader. First the CCD-camera makes a picture of the card before peroxidase coloring and then again a picture after the peroxidase coloring. These two pictures are subtracted from each other which results in the data which is called raw-data. This is copied into the Peplab™ database. Then the values are copied to excel and this file is labeled as raw-data file. One follow-up manipulation is allowed. Sometimes a well contains an air-bubble resulting in a false-positive value, the cards are manually inspected and any values caused by an air-bubble are scored as 0.

[0894] Normally assays are not done in replicate (only upon request client request). Replicate tests are usually very similar. In addition, the dataset of thousands of peptides contains many peptides that are similar, thus results are never based on recognition of one peptide but on families of similar peptides. If one or a few peptides do not bind, or exhibit lower binding, in a replicate experiment, a different epitope mapping is not normally attributed.

[0895] Timmerman et al. (2007). Functional reconstruction and synthetic mimicry of a conformational epitope using CLIPS™ technology. J. Mol. Recognit. 20:283-99

[0896] Slootstra et al. (1996). Structural aspects of antibody-antigen interaction revealed through small random peptide libraries, Molecular Diversity, 1, 87-96.

### Example 9

### Analysis of pKal Sequences from Different Species

[0897] All available sequence of pKal were obtained from public databases and aligned using ClustalW and regions were highlighted based on solvent accessibility, contact with an active site Kunitz inhibitor, and those peptides identified by CLIPS analysis (FIGS. 10A-10C). Citrated plasma from each of these species was obtained and activated using a commercially available prekallikrein activator (from Enzyme Research Laboratories) according to the instructions of the manufacturer. Kallikrein activity was then measured in each of the samples in the presence or absence of X81-B01.

[0898] It was found that X81-B01 inhibited pKal from all the species except for pig pKal. Since the CLIPS analysis identified four peptides of pKal that X81-B01 binds to—C2 (positions 81-94), C3 (positions 101-108), C5 (positions 162-178) and C6 (positions 186-197)-differences in the pig pKal sequence that correspond to these peptides were examined to identify potential amino acids changes that account for the lack of inhibition of pig pKal by X81-B01. Peptides C2 and C3 are close in the sequence and are both highly similar in sequence among the different species. However, there is a difference at position 479. All the species except pig, frog, and dog have a serine at position 479. The frog and dog pKal sequence has an alanine and a threonine at position 479, respectively; both of which are considered conservative substitutions for a serine. In contrast, the pig pKal sequence has a leucine at position 479, which is a considerably less conservative substitution for a serine. Peptide C5 in pig pKal is highly similar to the sequences from the other species. However, at position 563, only in the pig pKal is a histidine present (bold in FIG. 10C). This position in all the other species, except frog, is a tyrosine. In the frog pKal, which is inhibited by X81-B01, this position is a threonine. Peptide C6 in pig pKal is again highly similar to the other sequences. However, only in the pig pKal sequence is position 585 a glutamate (in bold in FIG. 10C). In all the other species this position is an aspartate. This analysis may indicate potentially critical residues in pKal that interact with X81-B01.

### Example 10

### In Vitro and In Vivo Assays to Assess Efficacy of a Plasma Kallikrein Binding Protein

[0899] Binding to prekallikrein vs. kallikrein: The advantage of an antibody inhibitor of pKal that does not bind prekallikrein over an antibody that binds prekallikrein can be demonstrated experimentally. For example, an in vitro experiment can be designed to compare the potency of a pKal antibody inhibitor that does not bind prekallikrein (e.g. DX-2922) with one that binds prekallikrein (e.g. M6-D09) using an activated partial thromboplastin time (APTT) plasma clotting time assay. The APTT assay induces clotting in plasma by the addition of a reagent that specifically activates the contact system component of the intrinsic coagulation pathway, of which the activity of pKal is involved. It is well known in the literature that the inhibition of pKal or that a genetic deficiency in pKal leads to prolonged aPPT (see e.g., Morishita, H., et al., Thromb Res, 1994. 73(3-4): p. 193-204; Wynne Jones, D., et al., Br J Haematol, 2004. 127(2): p. 220-3). An in vitro experiment can be performed to measure the effect of spiking citrated human plasma with different concentrations of either M6-D09 or DX-2922 on observed clotting times induced using commercially available APTT reagents and a coagulation analyzer (Table 13). It is expected that the observed EC50 for APTT prolongation of M6-D09 will be significantly higher than that of DX-2922 due to the binding of M6-D09 to the high concentration prekallikrein (˜500 nM) in the normal plasma sample. Efficacy of the antibody inhibitor of pKal as demonstrated by prolonging APTT supports the potential therapeutic use of the antibody in treating or preventing cardiovascular disease associated with aberrant clot formation, such as may be observed in atherosclerosis, stroke, vasculitis, aneurism, and patients implanted with ventricular assist devices.

TABLE 13
Study Design to Measure Effect of
Antibody Inhibitors of pKal on APTT

| Condition | Observed Effect on APPT |
|---|---|
| No treatment, just plasma | Normal |
| Prekallikrein depleted plasma | Maximum prolongation |
| control (commercially available) | |
| M6-D09 at low concentration | Normal |
| M6-D09 at middle concentration | Normal |
| M6-D09 at high concentration | Prolonged APTT |
| DX-2922 at low concentration | Prolonged APTT |
| DX-2922 at middle concentration | Prolonged APTT |
| DX-2922 at high concentration | Maximum prolongation |

[0900] Efficacy in a rat model of edema: An in vivo experiment can also be conducted to demonstrate the increased potency of an antibody inhibitor of pKal that does not bind prekallikrein. The carrageenan-induced paw edema (CPE) model of edema in rats is a common pharmacology model. A group of rats will be treated with escalating doses of M6-D09 and DX-2922 by intraperitoneal (IP) injection prior to injecting carrageenan (e.g. 0.1 mL of a 10% w/v solution) in the paws of the rats (Table 14). It is expected that DX-2922 will be more effective in reducing the observed paw swelling than M6-D09. Efficacy of the antibody supports the therapeutic use of the antibody in various inflammatory diseases that are associated with either swelling (e.g. hereditary angioedema, stroke induced edema, brain edema) or bradykinin mediated inflammation and pain (e.g. rheumatoid arthritis, inflammatory bowel disease).

TABLE 14
Study Design to Observe Effect of Antibody Inhibitors on CPE

| | | Example | |
|---|---|---|---|
| | | Dose | |
| Group | Treatment | (mg/Kg) | Effect Expected |
| 1 | Vehicle | N/A | Maximum swelling |
| 2 | Indomethacin | 5 | Maximum reduction of swelling |
| | (positive | | |
| | control) | | |
| 3 | M6-D09 | 1 | No effect on swelling |
| 4 | M6-D09 | 3 | No effect on swelling |
| 5 | M6-D09 | 10 | Intermediate reduction of swelling |
| 6 | DX-2922 | 1 | No effect on swelling |
| 7 | DX-2922 | 3 | Intermediate reduction of swelling |
| 8 | DX-2922 | 10 | Maximum reduction of swelling |

[0901] Measuring half-life: The pharmacokinetic properties of DX-2922 will be determined in rats and cynomolgus monkeys in a study design outlined in Table 15. Serum will be collected at the times indicated following IV injection of DX-2922. The concentration of DX-2922 will be determined by ELISA and plotted versus time in order to obtain pharmacokinetic parameters (clearance, half life, volume of distribution, etc). It is expected that DX-2922 will have a half-life greater than 5 days in cynomolgus monkeys that will scale to a half life greater than 7 days in humans.

TABLE 15
A Pharmacokinetic study of plasma kallikrein
inhibitor pKal administered by intravenous and
subcutaneous routes to cynomolgus monkeys.

| | | Dosage | | | |
|---|---|---|---|---|---|
| | | Level | | Number of | |
| | Treat- | (mg/kg/ | | Animals | Serum |
| Group | ment | day) | Route | (sex) | Collection |
| 1 | pKAL | 20 | IV | 4 (M) | Pre-dose |
| | | | | | 0.08, 0.25. 0.5, 1, 4, |
| | | | | | 24 hours |
| | | | | | Day 2, 3, 4, 5, 6, 7, 8, |
| | | | | | 9, 10, 11, 12, 13, 14 |
| 2 | pKAL | 20 | IV | 4 (M) | Pre-dose |
| | | | | | 0.08, 0.25. 0.5, 1, 4, |
| | | | | | 24 hours |
| | | | | | Day 2, 3, 4, 5, 6, 7, 8, |
| | | | | | 9, 10, 11, 12, 13, 14 |

### Example 11

### Epitope Mapping Using Amino Acid Mutations of pKal

[0902] Based on the epitope mapping studies described herein in Example 8, we inspected the published 3 dimensional model in the RCSB Protein Data Bank (available on the world wide web at rcsb.org; pdb code 2ANY) and identified a collection of sets of amino acids in surface accessible loops near the enzyme active site that we reasoned could interact with the antibody binding resulting in enzyme inhibition. These amino acids were substituted for alanine and the catalytic domain of each of the mutant was expressed in Pichia pastoris with a His tag fusion and purified by IMAC. Four different mutant pKal mutants were synthesized and tested:

[0903] Mutant 1: Amino acids S478, N481, S525, and K526 of the human kallikrein sequence (Accession No. NP_{—}00883.2) were mutated to alanine. These amino acids were determined to be involved in substrate recognition (S3 subsite).

[0904] Mutant 2: Amino acid residues R551, Q553, Y555, T558 and R560 of the human kallikrein sequence (Accession No. NP_{—}00883.2) were mutated to alanine. It was determined that these residues are involved in the active site substrate recognition (S1′ subsite).

[0905] Mutant 3: Amino acids D572, K575, and D577 of the human kallikrein sequence (Accession No. NP_{—}00883.2) were mutated to alanine. These amino acid residues are involved in substrate recognition (S1′ subsite)

[0906] Mutant 4: Amino acids N395, S397 and S398 of the human kallikrein sequence (Accession No. NP_{—}00883.2) were mutated to alanine. These residues are distal from the active site of plasma kallikrein.

[0907] Three of the 4 mutants (Mutant 1, 2, and 4) have similar activity to that of the wildtype catalytic domain of pKal. The amino acid substitutions in Mutant 3 yielded an inactive protein that was not recognized in SPR (Biacore) binding assays by any of the tested anti-pKal antibodies.

[0908] The antibodies tested for inhibition of mutants 1, 2 and 4 are shown herein in Table 16. Based on the measured K_{i,app} values for the antibodies in Group 1 (i.e., antibodies that inhibit human and mouse pKal but do not bind prekallikrein) it is evident that this group of antibodies binds an epitope on pKal that contains the amino acids that were mutated in Mutant 2 but were not dependent on residues mutated in Mutants 1 or 4. In addition, the interaction of plasma kallikrein binding proteins X81-B01/X101-A01/DX-2922 and affinity matured derivative X115-B07 to kallikrein is adversely affected by the substitutions in Mutant 1. For an example of the differences in the ability of the antibodies to bind prekallikrein see e.g., FIGS. 11A and 11B, which compares prekallikrein the binding of DX-2922 (Group 1) to that of M6-D09 (Group 3).

[0909] The antibodies in Group 2 (i.e., those that inhibit human pKal not mouse pkal and do not bind prekallikrein) were not significantly affected by the mutated amino acids indicating that they make contact with alternate amino acids. The Group 2 antibodies are likely to bind near the active site, as they were unable to bind pKal complexed with a Kunitz domain (EPI-KAL2), which are known to bind at the active site of a serine protease. Furthermore, one of the antibodies in Group 2 (M145-D11) is similar to those in Group 1 in that it is unable to bind pKal in a Biacore assay that is inactivated with the suicide inhibitor AEBSF (4-(2-Aminoethyl)benzenesulfonyl fluoride hydrochloride), which is a small molecule covalent inhibitor of trypsin-like serine proteases (FIG. 12). However, the other antibody (M29-D09) assigned to Group 2 was able to bind AEBSF inactivated pKal, indicating that it may bind a different epitope than M145-D11 despite sharing similar binding properties.

[0910] The antibodies in Group 3 inhibited human and mouse pKal but bound prekallikrein. One of these antibodies, M6-D09, was unable to bind pKal inactivated by either EPI-KAL2 or AEBSF, indicating that this group of pKal inhibitors interacts with alternative amino acids near the active site. The K_{i,app} for M6-D09 increased approximately 5-fold towards Mutant 2 (i.e., decreased potency of M6-D09).

### Example 12

### Affinity Maturation

[0911] In addition to the affinity maturation described herein in Examples 4 and 5, which involved optimization of the light chain we attempted to further optimize affinity with libraries that vary amino acids in the CDR1, CDR2, and CDR3 regions of the variable heavy chain of two different parental anti-pKal antibodies. Both of the antibodies selected for further optimization (X63-G06 and M162-A04) exhibit desirable properties for further development as a therapeutic antibody inhibitor of plasma kallikrein; properties which include: a) complete inhibition of human and rodent plasma kallikrein and b) no binding to prekallikrein. In some embodiments, complete inhibition of human pKal is essential to block the activity of plasma kallikrein in disease uses. Inhibition of rodent pKal facilitates preclinical development including toxicity assessment. The lack of binding to prekallikrein is a highly desirable property for an antibody inhibitor of pKal to maximize the bioavailability of the antibody therapeutic towards active pKal target and to potentially reduce the dose required for efficacy.

[0912] Affinity maturation was performed using 4 different phage display libraries. For each parental antibody (e.g., 162-A04), a library was constructed that contained varied amino acid positions in both the CDR1 and the CDR2 of the heavy chain. An additional library was constructed for each of the two parental antibodies wherein positions in the CDR3 of the heavy chain were varied. Each of these 4 phage display libraries were selected (panned) with decreasing amounts of active pKal in each subsequent round in order to obtain high affinity antibodies. To minimize the appearance of prekallikrein binding in the selected antibody output libraries were initially depleted against immobilized prekallikrein. After screening as Fab fragments, we discovered the affinity matured antibodies shown in Table 16 (i.e. the antibodies with the identification number starting with “X115”).

[0913] Four discovered antibodies (X115-B07, X115-D05, X115-E09, and X115-H06) are derived from the DX-2922 parental antibody (also known as X63-G06 as a Fab fragment, X81-B01 as an IgG produced in 293T cells, or X101-A01 as an IgG produced in CHO cells) were found to be potent pKal inhibitors. For comparison the amino acid sequence of DX-2922 is shown. It is evident that three of the affinity matured antibodies (X115-B07, X115-E09, and X115-H06) contain mutations in Hv-CDR3; whereas X115-D05 has a different Hv-CDR1/CDR2. Four other discovered antibodies (X115-F02, X115-A03, X115-D01, and X115-G04) are derived from the M162-A04 parental antibody. All 8 affinity matured antibodies do not bind prekallikrein.

TABLE 16
Summary of Affinity Matured Anti-pKal Antibodies Inhibition Constants (Ki, app) on Wild Type pKal Catalytic
Domain and Mutants 1, 2, and 4^{a}.

| | WT cat. | Mutant | | Mutant | | | |
|---|---|---|---|---|---|---|---|
| | Domain | 1 Ki, | Mutant 2 | 4 Ki, | Competes | Competes | |
| | Ki, app | app | Ki, app | app | with | with epi- | |
| Isolate | (nM) | (nM) | (nM) | (nM) | AEBSF | kal2 | Characteristics |
| DX-2922 | 0.22 | 14 | 20 | 0.25 | y | y | inhibits human and mouse pKal; |
| | | | | | | | does not bind pre-kallikrein |
| 559A-X115-B07 | 0.13 | 4.7 | 47 | 0.14 | y | nd | inhibits human and mouse pKal; |
| (aff mat; X101-A01 | | | | | | | does not bind pre-kallikrein |
| parent) | | | | | | | |
| 559A-X115-D05 | nd | nd | nd | nd | y | nd | inhibits human and mouse pKal; |
| (aff mat; X101-A01 | | | | | | | does not bind pre-kallikrein |
| parent) | | | | | | | |
| 559A-X115-E09 | nd | nd | nd | nd | y | nd | inhibits human and mouse pKal; |
| (aff mat; X101-A01 | | | | | | | does not bind pre-kallikrein |
| parent) | | | | | | | |
| 559A-X115-H06 | nd | nd | nd | nd | y | nd | inhibits human and mouse pKal; |
| (aff mat; X101-A01 | | | | | | | does not bind pre-kallikrein |
| parent) | | | | | | | |
| 559A-X115-A03 | 0.16 | 0.23 | 3.7 | 0.13 | y | nd | inhibits human and mouse pKal; |
| (aff mat; M162-A04 | | | | | | | does not bind pre-kallikrein |
| parent) | | | | | | | |
| 559A-X115-D01 | 0.18 | 0.26 | 2.5 | 0.12 | y | nd | inhibits human and mouse pKal; |
| (aff mat; M162-A04 | | | | | | | does not bind pre-kallikrein |
| parent) | | | | | | | |
| 559A-X115-F02 | 0.09 | 0.14 | 5.9 | 0.1 | y | y | inhibits human and mouse pKal; |
| (aff mat; M162-A04 | | | | | | | does not bind pre-kallikrein |
| parent) | | | | | | | |
| 559A-X115-G04 | 0.3 | 0.4 | 2.2 | 0.3 | y | y | inhibits human and mouse pKal; |
| (aff mat; M162-A04 | | | | | | | does not bind pre-kallikrein |
| parent) | | | | | | | |
| 559A-M29-D09 (sFab)) | 0.24 | 0.27 | 0.34 | 0.39 | nd | y | inhibits human and mouse pKal; |
| | | | | | | | does not inhibit mouse pKal; does |
| | | | | | | | not bind pre-kallikrein |
| 559A-M145-D11 (sFab) | 0.16 | 0.23 | 0.1 | 0.21 | y | y | inhibits human and mouse pKal; |
| | | | | | | | weakly inhibits mouse pKal; does |
| | | | | | | | not bind pre-kallikrein |
| | | | | | | y | |
| 559A-M06-D09 | 2.5 | 3.4 | 13.5 | 2.9 | y | y | inhibits human and mouse pKal; |
| | | | | | | | binds pre-kallikrein |
| 559A-M35-G04 | 0.8 | 0.09 | 1.1 | 0.8 | nd | nd | inhibits human and mouse pKal; |
| | | | | | | | binds pre-kallikrein |

^{a}Antibodies were obtained from HV-CDR1/2 and HV-CDR3 affinity maturation, purified and tested for inhibition of either wild type pKal catalytic domain (Note, the antibodies inhibited full length wild type pKal approximately equal to that of the wild type catalytic domain).

TABLE 17

| Isolate | LV-CDR1 | LV-CDR2 | LV-CDR3 | HV-CDR1 | HV-CDR2 | HV-CDR3 |
|---|---|---|---|---|---|---|
| DX-2922 | RTSQFVNSNYLA | GASSRAT | QQSSRTPWT | HYLMT | YISPSGGHTIYADSVKG | VARGIAARSRTSYFDY |
| X115-B07 | RTSQFVNSNYLA | GASSRAT | QQSSRTPWT | HYLMT | YISPSGGHTIYADSVKG | VGQGIRGRSRTSYFAQ |
| X115-D05 | RTSQFVNSNYLA | GASSRAT | QQSSRTPWT | DYMMA | SIVPSGGHTHYADSVKG | VARGIAARSRTSYFDY |
| X115-E09 | RTSQFVNSNYLA | GASSRAT | QQSSRTPWT | HYLMT | YISPSGGHTIYADSVKG | VAQGIAARSRTSSVDQ |
| X115-H06 | RTSQFVNSNYLA | GASSRAT | QQSSRTPWT | HYLMT | YISPSGGHTIYADSVKG | VAQGISARSRTSYFDY |
| M162-A04 | RASQSISSWLA | KASTLES | QQYNTYWT | HYIMM | GIYSSGGITVYADSVKG | RRTGIPRRDAFDI |
| X115-A03 | RASQSISSWLA | KASTLES | QQYNTYWT | HYIMM | GIYSSGGITVYADSVKG | RRIGVPRRDSFDM |
| X115-D01 | RASQSISSWLA | KASTLES | QQYNTYWT | IYSMH | SIYPSRGMTWYADSVKG | RRTGIPRRDAFDI |
| X115-F02 | RASQSISSWLA | KASTLES | QQYNTYWT | HYIMM | GIYSSGGITVYADSVKG | RRIGVPRRDEFDI |
| X115-G04 | RASQSISSWLA | KASTLES | QQYNTYWT | HYIMM | GIYSSGGITVYADSVKG | RRTGVPRRDEFDI |
| M29-D09 | SGNKLGDKYVA | QDTKRPS | QAWDSSIVI | WYTMV | YIYPSGGATFYADSVKG | GSYDYIWGFYSDH |
| M145-D11 | SGDKLGDKYTS | QDIKRPS | QAWDSPNARV | HYRMS | SIYPSGGRTVYADSVKG | DKFEWRLLFRGIGNDAFDI |
| M06-D09 | RASQSIRNYLN | AASTLQS | QQLSGYPHT | FYYMV | VIYPSGGITVYADSVKG | DKWAVMPPYYYYAMDV |
| M35-G04 | RASQSVSSYLA | DASNRAT | QQRSNWPRGFT | YYHMS | VISPSGGSTKYADSVKG | GGSSDYAWGSYRRPYYFDY |

| | Full | | | | | | | |
|---|---|---|---|---|---|---|---|---|
| | length | WT cat. | | | | | | |
| | pKal | Domain | Mutant 1 | Mutant 2 | Mutant 4 | competes | competes | |
| | Ki, app | Ki, app | Ki, app | Ki, app | Ki, app | with | with epi- | |
| Isolate | (nM) | (nM) | (nM) | (nM) | (nM) | AEBSF | kal2 | Group |
| DX-2922 | 0.2 | 0.22 | 14 | 20 | 0.25 | y | y | 1 |
| X115-B07 | 0.33 | | 4.7 | 47 | 0.14 | y | nd | 1 |
| X115-D05 | 0.25 | nd | nd | nd | nd | y | nd | 1 |
| X115-E09 | 0.34 | nd | nd | nd | nd | y | nd | 1 |
| X115-H06 | 0.35 | nd | nd | nd | nd | y | nd | 1 |
| M162-A04 | | nd | nd | nd | nd | y | y | 1 |
| X115-A03 | 0.16 | 0.16 | 0.23 | 3.7 | 0.13 | y | nd | 1 |
| X115-D01 | 0.18 | 0.18 | 0.26 | 2.5 | 0.12 | y | nd | 1 |
| X115-F02 | 0.089 | 0.09 | 0.14 | 5.9 | 0.1 | y | y | 1 |
| X115-G04 | 0.6 | 0.3 | 0.4 | 2.2 | 0.3 | y | y | 1 |
| M29-D09 | 0.7 | 0.24 | 0.27 | 0.34 | 0.39 | n | y | 2 |
| M145-D11 | 0.79 | 0.16 | 0.23 | 0.1 | 0.21 | y | y | 2 |
| M06-D09 | 5.9 | 2.5 | 3.4 | 13.5 | 2.9 | y | y | 3 |
| M35-G04 | 2.9 | 0.8 | 0.09 | 1.1 | 0.8 | nd | nd | 3 |

[0914] Equilibrium K_{i,app} measurements. Apparent Inhibition constants (k_{i,app} values) were measured by pre-incubating enzyme and inhibitor solutions prior to initiating the reactions with substrate. Enzyme and inhibitor were pre-incubated for 2 hours at 30° C. in a 96-well plate by adding 10 μL of a 10× enzyme solution and 10 μL of 10× inhibitor solutions to 70 μL of reaction buffer. Reactions were initiated by the addition of 10 μL of a 10× concentrated stock of substrate, and were monitored at 30° C. in a fluorescence plate reader with the excitation and emission wavelengths set at 360 nm/460 nm, respectively. Kinetic data were acquired by the increase in fluorescence, and initial rates for each condition were plotted against the total inhibitor concentration. The data was fit to the following equation for tight binding inhibitors:

$$A = {A}_{0} - {A}_{i nh} ( \frac{( {K}_{i , app} + Inh + E ) - \sqrt{{( {K}_{i , app} + Inh + E )}^{2} - 4 \cdot Inh \cdot E}}{2 \cdot E} ) \qquad Eqn . 1$$

[0915] Where A=initial rate observed at each inhibitor concentration; Aₒ=initial rate observed in the absence of inhibitor; Aᵢₙₕ=initial rate observed for the enzyme inhibitor complex; Inh=concentration of inhibitor; E=total enzyme concentration (treated as a floated parameter); and K_{i,app}=apparent equilibrium inhibition constant.

[0916] Groups of Antibody Inhibitors. Antibodies in Group 1 inhibit human and mouse pKal but do not bind prekallikrein. Antibodies in Group 2 inhibit human but not mouse pKal and do not bind prekallikrein. Antibodies in Group 3 inhibit human and mouse pKal but bind prekallikrein.

[0917] Biacore competition analysis with an exemplary kallikrein antibody, epi-Kal2.

[0918] Epi-Kal2 is an antibody inhibitor of kallikrein that acts by binding to the active site of kallikrein (for sequence see Example 8). The Biacore competition analysis is used herein as an assay to determine whether a test kallikrein antibody binds to the same site as epi-Kal2 and is assessed by measuring the competition (e.g., displacement) between epi-Kal2 and the test antibody for binding to the active site.

[0919] Goat anti-human Fc fragment specific IgG or anti-human Fab IgG was immobilized by amine coupling on a CM5 sensor chip at immobilization densities of approximately 5000 RU. Anti-pKal antibodies or sFabs were captured on their respective surfaces by injecting a 50 nM solution of IgG/sFab for 1-2 minutes at 5 at μl/min. Human pKal (100 nM) or human pKal-ep-kal2 complex (100 nM hpKal that had been pre-incubated with 1 μM epi-kal2 for 1 hour at room temperature) were injected over the captured IgGs or sFabs for 5 minutes at 20-50 μl/min followed by a 5-10 minute dissociation phase. Binding responses were recorded at the end of the association phase. Anti-pKal IgGs or sFabs were considered to compete with epi-kal2 for binding to human pKal if binding of the pKal-epi-kal2 complex to anti-pKal antibodies was significantly reduced (>70%) as compared to an injection of hpKal only. The sensor chip surface was regenerated with a pulse of 10 mM glycine pH 1.5 at a flow rate of 100 μl/min. Measurements were performed at 25° C. using HBS-P (10 mM HEPES pH 7.4, 150 mM NaCl and 0.005% surfactant P20) as the running buffer. Results from the Biacore competition analysis for epi-Kal2 are shown herein in FIGS. 11A and 11B.

[0920] Biacore Competition Analysis with the Small Molecule Kallikrein Inhibitor, AEBSF.

[0921] AEBSF (i.e., 4-(2-aminoethyl)benzene sulfonyl fluoride hydrochloride) is a small molecule inhibitor of kallikrein. The Biacore competition analysis is used herein to determine whether a test antibody binds to the same site (or an overlapping site) utilized by AEBSF for kallikrein inhibition.

[0922] Goat anti-human Fc fragment specific IgG or anti-human Fab IgG was immobilized by amine coupling on a CM5 sensor chip at immobilization densities of approximately 5000 RU. Anti-pKal IgGs or sFabs were captured on their respective surfaces by injecting a 50 nM solution of IgG/sFab for 1-2 minutes at 5 at μl/min. Human pKal (100 nM) or human pKal-AEBSF complex (100 nM hpKal that had been pre-treated with 1 mM AEBSF for 1 hour at room temperature) were injected over the captured IgGs or sFabs for 5 minutes at 20-50 μl/min followed by a 5-10 minute dissociation phase. Binding responses were recorded at the end of the association phase. Anti-pKal IgGs or sFabs were considered to compete with AEBSF for binding to human pKal if binding of the pKal-AEBSF complex to anti-pKal antibodies was significantly reduced (>70%) as compared to an injection of hpKal only. The sensor chip surface was regenerated with a pulse of 10 mM glycine pH 1.5 at a flow rate of 100 μl/min. Measurements were performed at 25° C. using HBS-P (10 mM HEPES pH 7.4, 150 mM NaCl and 0.005% surfactant P20) as the running buffer. Results from the Biacore competition analysis for AEBSF are shown herein in FIG. 12.

[0923] The following are Sequences for the light chain variable regions (LV), and heavy chain variable regions (HV) regions for 8 Exemplary Affinity Matured Anti-pKal Antibodies:

559A-M0029-D09-LV
QSALTQPPTVSVSPGQTARITCSGNKLGDKYVAWYQQKPGQSPMLVIYQDTKRPSRVSERFSGSNSANTAT
LSISGTQALDEADYYCQAWDSSIVIFGGGTRLTVL
559A-M0145-D11-LV
QSVLTQPPSVSVSPGQTASITCSGDKLGDKYTSWYQQRPGQSPVLVIYQDIKRPSGIPERFSGSNSGNTAT
LTISGTQAMDEADYYCQAWDSPNARVFGSGTKVTVL
559A-M0162-A04-LV
DIQMTQSPSTLSASVGDRVTITCRASQSISSWLAWYQQKPGKAPNLLIYKASTLESGVPSRFSGSGSGTEF
TLTISSLQPDDFATYYCQQYNTYWTFGQGTKVEIK
559A-X0101-A01-LV
EIVLTQSPGTLSLSPGERATLSCRTSQFVNSNYLAWYQQKPGQAPRLLIYGASSRATGIPDRFSGSGSGTD
FTLTISRLEPEDFAVYYCQQSSRTPWTFGQGTKVEIK
559A-X0115-A03-LV
DIQMTQSPSTLSASVGDRVTITCRASQSISSWLAWYQQKPGKAPKLLIYKASTLESGVPSRFSGSGSGTEF
TLTISSLQPDDFATYYCQQYNTYWTFGQGTKVEIK
559A-X0115-B07-LV
EIVLTQSPGTLSLSPGERATLSCRTSQFVNSNYLAWYQQKPGQAPRLLIYGASSRATGIPDRFSGSGSGTD
FTLTISRLEPEDFAVYYCQQSSRTPWTFGQGTKVEIK
559A-X0115-D01-LV
DIQMTQSPSTLSASVGDRVTITCRASQSISSWLAWYQQKPGKAPKLLIYKASTLESGVPSRFSGSGSGTEF
TLTISSLQPDDFATYYCQQYNTYWTFGQGTKVEIK
559A-X0115-D05-LV
EIVLTQSPGTLSLSPGERATLSCRTSQFVNSNYLAWYQQKPGQAPRLLIYGASSRATGIPDRFSGSGSGTD
FTLTISRLEPEDFAVYYCQQSSRTPWTFGQGTKVEIK
559A-X0115-E09-LV
EIVLTQSPGTLSLSPGERATLSCRTSQFVNSNYLAWYQQKPGQAPRLLIYGASSRATGIPDRFSGSGSGTD
FTLTISRLEPEDFAVYYCQQSSRTPWTFGQGTKVEIK
559A-X0115-F02-LV
DIQMTQSPSTLSASVGDRVTITCRASQSISSWLAWYQQKPGKAPKLLIYKASTLESGVPSRFSGSGSGTEF
TLTISSLQPDDFATYYCQQYNTYWTFGQGTKVEIK
559A-X0115-G04-LV
DIQMTQSPSTLSASVGDRVTITCRASQSISSWLAWYQQKPGKAPKLLIYKASTLESGVPSRFSGSGSGTEF
TLTISSLQPDDFATYYCQQYNTYWTFGQGTKVEIK
559A-X0115-H06-LV
EIVLTQSPGTLSLSPGERATLSCRTSQFVNSNYLAWYQQKPGQAPRLLIYGASSRATGIPDRFSGSGSGTD
FTLTISRLEPEDFAVYYCQQSSRTPWTFGQGTKVEIK
559A-M0006-D09-LV
DIQMTQSPSSLSASVGDRVTITCRASQSIRNYLNWYQQKPGKAPNLLIYAASTLQSGVPARFSGSGSGTDF
TLTISSLQPEDFATYYCQQLSGYPHTFGQGTKLEIK
559A-M0035-G04-LV
QDIQMTQSPATLSLSPGERATLSCRASQSVSSYLAWYQQKPGQAPRLLIYDASNRATGIPARFSGSGSGTD
FTLTISSLEPEDFAVYYCQQRSNWPRGFTFGPGTKVDIK
559A-M0029-D09-HV
EVQLLESGGGLVQPGGSLRLSCAASGFTFSWYTMVWVRQAPGKGLEWVSYIYPSGGATFYADSVKGRFTIS
RDNSKNTLYLQMNSLRAEDTAVYYCAMGSYDYIWGFYSDHWGQGTLVTVSS
559A-M0145-D11-HV
EVQLLESGGGLVQPGGSLRLSCAASGFTFSHYRMSWVRQAPGKGLEWVSSIYPSGGRTVYADSVKGRFTIS
RDNSKNTLYLQMNSLRAEDTAVYYCAKDKFEWRLLFRGIGNDAFDIWGQGTMVTVSS
559A-M0162-A04-HV
EVQLLESGGGLVQPGGSLRLSCAASGFTFSHYIMMWVRQAPGKGLEWVSGIYSSGGITVYADSVKGRFTIS
RDNSKNTLYLQMNSLRAEDTAVYYCAYRRTGIPRRDAFDIWGQGTMVTVSS
559A-X0101-A01-HV
EVQLLESGGGLVQPGGSLRLSCAASGFTFSHYLMTWVRQAPGKGLEWVSYISPSGGHTIYADSVKGRFTIS
RDNSKNTLYLQMNSLRAEDTAVYYCARVARGIAARSRTSYFDYWGQGTLVTVSS
559A-X0115-A03-HV
EVQLLESGGGLVQPGGSLRLSCAASGFTFSHYIMMWVRQAPGKGLEWVSGIYSSGGITVYADSVKGRFTIS
RDNSKNTLYLQMNSLRAEDTAVYYCAWRRIGVPRRDSFDMWGQGTMVTVSS
559A-X0115-B07-HV
EVQLLESGGGLVQPGGSLRLSCAASGFTFSHYLMTWVRQAPGKGLEWVSYISPSGGHTIYADSVKGRFTIS
RDNSKNTLYLQMNSLRAEDTAVYYCAMVGQGIRGRSRTSYFAQWGQGTLVTVSS
559A-X0115-D01-HV
EVQLLESGGGLVQPGGSLRLSCAASGFTFSIYSMHWVRQAPGKGLEWVSSIYPSRGMTWYADSVKGRFTIS
RDNSKNTLYLQMNSLRAEDTAVYYCAYRRTGIPRRDAFDIWGQGTMVTVSS
559A-X0115-D05-HV
EVQLLESGGGLVQPGGSLRLSCAASGFTFSDYMMAWVRQAPGKGLEWVSSIVPSGGHTHYADSVKGRFTIS
RDNSKNTLYLQMNSLRAEDTAVYYCARVARGIAARSRTSYFDYWGQGTLVTVSS
559A-X0115-E09-HV
EVQLLESGGGLVQPGGSLRLSCAASGFTFSHYLMTWVRQAPGKGLEWVSYISPSGGHTIYADSVKGRFTIS
RDNSKNTLYLQMNSLRAEDTAVYYCARVAQGIAARSRTSSVDQWGQGTLVTVSS
559A-X0115-F02-HV
EVQLLESGGGLVQPGGSLRLSCAASGFTFSHYIMMWVRQAPGKGLEWVSGIYSSGGITVYADSVKGRFTIS
RDNSKNTLYLQMNSLRAEDTAVYYCAYRRIGVPRRDEFDIWGQGTMVTVSS
559A-X0115-G04-HV
EVQLLESGGGLVQPGGSLRLSCAASGFTFSHYIMMWVRQAPGKGLEWVSGIYSSGGITVYADSVKGRFTIS
RDNSKNTLYLQMNSLRAEDTAVYYCAYRRTGVPRRDEFDIWGQGTMVTVSS
559A-X0115-H06-HV
EVQLLESGGGLVQPGGSLRLSCAASGFTFSHYLMTWVRQAPGKGLEWVSYISPSGGHTIYADSVKGRFTIS
RDNSKNTLYLQMNSLRAEDTAVYYCARVAQGISARSRTSYFDYWGQGTLVTVSS
559A-M0006-D09-HV
EVQLLESGGGLVQPGGSLRLSCAASGFTFSFYYMVWVRQAPGKGLEWVSVIYPSGGITVYADSVKGRFTIS
RDNSKNTLYLQMNSLRAEDTAVYYCARDKWAVMPPYYYYAMDVWGQGTTVTVSS
559A-M0035-G04-HV
EVQLLESGGGLVQPGGSLRLSCAASGFTFSYYHMSWVRQAPGKGLEWVSVISPSGGSTKYADSVKGRFTIS
RDNSKNTLYLQMNSLRAEDTAVYYCARGGSSDYAWGSYRRPYYFDYWGQGTLVTVSS
559A-M0029-D09 LV
CAGAGCGCTTTGACTCAGCCACCCACAGTGTCTGTGTCCCCAGGACAGACAGCCAGGATCACCTGCTCTGG
AAATAAATTGGGGGATAAATATGTTGCCTGGTATCAGCAGAAGCCAGGCCAGTCCCCTATGTTGGTCATCT
ATCAAGATACTAAGCGCCCCTCAAGAGTTTCTGAGCGATTCTCTGGCTCCAACTCTGCGAATACAGCCACT
CTGTCCATCAGCGGGACCCAGGCTCTGGATGAGGCTGACTATTACTGTCAGGCGTGGGACAGCAGCATTGT
GATCTTCGGCGGAGGGACCAGGCTGACCGTCCTA
559A-M0145-D11 LV
CAGAGCGTCTTGACTCAGCCACCCTCAGTGTCCGTGTCTCCAGGACAGACAGCCAGCATCACCTGCTCTGG
AGATAAATTGGGGGATAAATATACTTCCTGGTATCAGCAGAGGCCAGGCCAGTCCCCTGTATTGGTCATCT
ATCAAGATATCAAGCGGCCCTCAGGGATCCCTGAGCGATTCTCTGGCTCCAACTCTGGGAACACAGCCACT
CTGACCATCAGCGGGACCCAGGCTATGGATGAGGCTGACTATTACTGTCAGGCGTGGGACAGTCCCAATGC
GAGGGTCTTCGGATCTGGGACCAAGGTCACCGTCCTA
559A-M0162-A04 LV
GACATCCAGATGACCCAGTCTCCTTCCACCCTGTCTGCATCTGTAGGAGACAGAGTCACCATCACTTGCCG
GGCCAGTCAGAGTATCAGTAGTTGGTTGGCCTGGTATCAGCAGAAACCAGGGAAAGCCCCTAACCTCCTGA
TCTATAAGGCGTCTACTTTAGAAAGTGGGGTCCCATCAAGGTTCAGCGGCAGTGGATCTGGGACAGAATTC
ACTCTCACCATCAGCAGCCTGCAGCCTGATGATTTTGCAACTTATTACTGCCAACAGTATAATACTTATTG
GACGTTCGGCCAAGGGACCAAGGTGGAAATCAAA
559A-X0101-A01 LV
GAGATCGTGCTGACCCAGTCCCCTGGCACCCTGTCTCTGTCTCCCGGCGAGAGAGCCACCCTGTCCTGCCG
GACCTCCCAGTTCGTGAACTCCAACTACCTGGCTTGGTATCAGCAGAAGCCAGGCCAGGCCCCTAGACTGC
TGATCTACGGCGCCTCTTCCAGAGCCACCGGCATCCCTGACCGGTTCTCCGGCTCTGGCTCCGGCACCGAC
TTCACCCTGACCATCTCCCGGCTGGAACCTGAGGACTTCGCCGTGTACTACTGCCAGCAGTCCTCCCGGAC
CCCTTGGACCTTTGGCCAGGGCACCAAGGTGGAGATCAAG
559A-X0115-A03 LV
GACATCCAGATGACCCAGTCCCCCTCCACCCTGTCCGCCTCTGTGGGCGACAGAGTGACCATCACCTGTCG
GGCCTCCCAGTCCATCTCCAGCTGGCTGGCCTGGTATCAGCAGAAGCCCGGCAAGGCCCCCAAGCTGCTGA
TCTACAAGGCCAGCACCCTGGAATCCGGCGTGCCCTCCAGATTCTCCGGCTCTGGCTCCGGCACCGAGTTC
ACCCTGACCATCAGCTCCCTGCAGCCCGACGACTTCGCCACCTACTACTGCCAGCAGTACAACACCTACTG
GACCTTCGGCCAGGGCACCAAGGTGGAAATCAAG
559A-X0115-B07 LV
GAGATCGTGCTGACCCAGTCCCCTGGCACCCTGTCTCTGTCTCCCGGCGAGAGAGCCACCCTGTCCTGCCG
GACCTCCCAGTTCGTGAACTCCAACTACCTGGCTTGGTATCAGCAGAAGCCAGGCCAGGCCCCTAGACTGC
TGATCTACGGCGCCTCTTCCAGAGCCACCGGCATCCCTGACCGGTTCTCCGGCTCTGGCTCCGGCACCGAC
TTCACCCTGACCATCTCCCGGCTGGAACCTGAGGACTTCGCCGTGTACTACTGCCAGCAGTCCTCCCGGAC
CCCTTGGACCTTTGGCCAGGGCACCAAGGTGGAGATCAAG
559A-X0115-D01 LV
GACATCCAGATGACCCAGTCCCCCTCCACCCTGTCCGCCTCTGTGGGCGACAGAGTGACCATCACCTGTCG
GGCCTCCCAGTCCATCTCCAGCTGGCTGGCCTGGTATCAGCAGAAGCCCGGCAAGGCCCCCAAGCTGCTGA
TCTACAAGGCCAGCACCCTGGAATCCGGCGTGCCCTCCAGATTCTCCGGCTCTGGCTCCGGCACCGAGTTC
ACCCTGACCATCAGCTCCCTGCAGCCCGACGACTTCGCCACCTACTACTGCCAGCAGTACAACACCTACTG
GACCTTCGGCCAGGGCACCAAGGTGGAAATCAAG
559A-X0115-D05 LV
GAGATCGTGCTGACCCAGTCCCCTGGCACCCTGTCTCTGTCTCCCGGCGAGAGAGCCACCCTGTCCTGCCG
GACCTCCCAGTTCGTGAACTCCAACTACCTGGCTTGGTATCAGCAGAAGCCAGGCCAGGCCCCTAGACTGC
TGATCTACGGCGCCTCTTCCAGAGCCACCGGCATCCCTGACCGGTTCTCCGGCTCTGGCTCCGGCACCGAC
TTCACCCTGACCATCTCCCGGCTGGAACCTGAGGACTTCGCCGTGTACTACTGCCAGCAGTCCTCCCGGAC
CCCTTGGACCTTTGGCCAGGGCACCAAGGTGGAGATCAAG
559A-X0115-E09 LV
GAGATCGTGCTGACCCAGTCCCCTGGCACCCTGTCTCTGTCTCCCGGCGAGAGAGCCACCCTGTCCTGCCG
GACCTCCCAGTTCGTGAACTCCAACTACCTGGCTTGGTATCAGCAGAAGCCAGGCCAGGCCCCTAGACTGC
TGATCTACGGCGCCTCTTCCAGAGCCACCGGCATCCCTGACCGGTTCTCCGGCTCTGGCTCCGGCACCGAC
TTCACCCTGACCATCTCCCGGCTGGAACCTGAGGACTTCGCCGTGTACTACTGCCAGCAGTCCTCCCGGAC
CCCTTGGACCTTTGGCCAGGGCACCAAGGTGGAGATCAAG
559A-X0115-F02 LV
GACATCCAGATGACCCAGTCCCCCTCCACCCTGTCCGCCTCTGTGGGCGACAGAGTGACCATCACCTGTCG
GGCCTCCCAGTCCATCTCCAGCTGGCTGGCCTGGTATCAGCAGAAGCCCGGCAAGGCCCCCAAGCTGCTGA
TCTACAAGGCCAGCACCCTGGAATCCGGCGTGCCCTCCAGATTCTCCGGCTCTGGCTCCGGCACCGAGTTC
ACCCTGACCATCAGCTCCCTGCAGCCCGACGACTTCGCCACCTACTACTGCCAGCAGTACAACACCTACTG
GACCTTCGGCCAGGGCACCAAGGTGGAAATCAAG
559A-X0115-G04 LV
GACATCCAGATGACCCAGTCCCCCTCCACCCTGTCCGCCTCTGTGGGCGACAGAGTGACCATCACCTGTCG
GGCCTCCCAGTCCATCTCCAGCTGGCTGGCCTGGTATCAGCAGAAGCCCGGCAAGGCCCCCAAGCTGCTGA
TCTACAAGGCCAGCACCCTGGAATCCGGCGTGCCCTCCAGATTCTCCGGCTCTGGCTCCGGCACCGAGTTC
ACCCTGACCATCAGCTCCCTGCAGCCCGACGACTTCGCCACCTACTACTGCCAGCAGTACAACACCTACTG
GACCTTCGGCCAGGGCACCAAGGTGGAAATCAAG
559A-X0115-H06 LV
GAGATCGTGCTGACCCAGTCCCCTGGCACCCTGTCTCTGTCTCCCGGCGAGAGAGCCACCCTGTCCTGCCG
GACCTCCCAGTTCGTGAACTCCAACTACCTGGCTTGGTATCAGCAGAAGCCAGGCCAGGCCCCTAGACTGC
TGATCTACGGCGCCTCTTCCAGAGCCACCGGCATCCCTGACCGGTTCTCCGGCTCTGGCTCCGGCACCGAC
TTCACCCTGACCATCTCCCGGCTGGAACCTGAGGACTTCGCCGTGTACTACTGCCAGCAGTCCTCCCGGAC
CCCTTGGACCTTTGGCCAGGGCACCAAGGTGGAGATCAAG
559A-M0006-D09 LV
GACATCCAGATGACCCAGTCTCCATCCTCCCTGTCTGCATCTGTAGGAGACAGAGTCACCATCACTTGCCG
GGCAAGTCAGAGTATTCGCAACTATTTAAATTGGTATCAGCAGAAACCAGGGAAAGCCCCTAACCTCCTGA
TCTATGCTGCATCCACTTTGCAAAGTGGGGTCCCAGCAAGGTTCAGTGGCAGTGGATCTGGGACAGATTTC
ACTCTCACTATCAGCAGTCTGCAGCCTGAAGATTTTGCAACTTATTACTGTCAACAGCTTAGTGGTTACCC
CCACACTTTTGGCCAGGGGACCAAGCTGGAGATCAAA
559A-M0035-G04 LV
CAAGACATCCAGATGACCCAGTCTCCAGCCACCCTGTCTTTGTCTCCAGGGGAAAGAGCCACCCTCTCCTG
CAGGGCCAGTCAGAGTGTTAGCAGCTACTTAGCCTGGTACCAACAGAAACCTGGCCAGGCTCCCAGGCTCC
TCATCTATGATGCATCCAACAGGGCCACTGGCATCCCAGCCAGGTTCAGTGGCAGTGGGTCTGGGACAGAC
TTCACTCTCACCATCAGCAGCCTAGAGCCTGAAGATTTTGCAGTTTATTACTGTCAGCAGCGTAGCAACTG
GCCTCGCGGATTCACTTTCGGCCCTGGGACCAAAGTGGATATCAAA
559A-M0029-D09 HV
GAAGTTCAATTGTTAGAGTCTGGTGGCGGTCTTGTTCAGCCTGGTGGTTCTTTACGTCTTTCTTGCGCTGC
TTCCGGATTCACTTTCTCTTGGTACACTATGGTTTGGGTTCGCCAAGCTCCTGGTAAAGGTTTGGAGTGGG
TTTCTTATATCTATCCTTCTGGTGGCGCTACTTTTTATGCTGACTCCGTTAAAGGTCGCTTCACTATCTCT
AGAGACAACTCTAAGAATACTCTCTACTTGCAGATGAACAGCTTAAGGGCTGAGGACACGGCCGTGTATTA
CTGTGCGATGGGTTCATATGATTACATTTGGGGATTTTATAGTGACCACTGGGGCCAGGGAACCCTGGTCA
CCGTCTCAAGC
559A-M0145-D11 HV
GAAGTTCAATTGTTAGAGTCTGGTGGCGGTCTTGTTCAGCCTGGTGGTTCTTTACGTCTTTCTTGCGCTGC
TTCCGGATTCACTTTCTCTCATTACCGTATGTCTTGGGTTCGCCAAGCTCCTGGTAAAGGTTTGGAGTGGG
TTTCTTCTATCTATCCTTCTGGTGGCCGTACTGTTTATGCTGACTCCGTTAAAGGTCGCTTCACTATCTCT
AGAGACAACTCTAAGAATACTCTCTACTTGCAGATGAACAGCTTAAGGGCTGAGGACACGGCCGTGTATTA
CTGTGCGAAAGATAAGTTCGAGTGGAGGTTATTATTTCGCGGGATTGGAAATGATGCTTTTGATATCTGGG
GCCAAGGGACAATGGTCACCGTCTCAAGC
559A-M0162-A04 HV
GAAGTTCAATTGTTAGAGTCTGGTGGCGGTCTTGTTCAGCCTGGTGGTTCTTTACGTCTTTCTTGCGCTGC
TTCCGGATTCACTTTCTCTCATTACATTATGATGTGGGTTCGCCAAGCTCCTGGTAAAGGTTTGGAGTGGG
TTTCTGGTATCTATTCTTCTGGTGGCATTACTGTTTATGCTGACTCCGTTAAAGGTCGCTTCACTATCTCT
AGAGACAACTCTAAGAATACTCTCTACTTGCAGATGAACAGCTTAAGGGCTGAGGACACGGCCGTGTATTA
CTGTGCGTACCGCCGGACTGGGATTCCAAGAAGAGATGCTTTTGATATCTGGGGCCAAGGGACAATGGTCA
CCGTCTCAAGC
559A-X0101-A01 HV
GAGGTGCAATTGCTGGAATCCGGCGGAGGTCTGGTGCAGCCTGGCGGCTCCCTGAGACTGTCTTGCGCCGC
CTCCGGCTTCACCTTCTCCCACTACCTGATGACCTGGGTGCGCCAGGCTCCTGGCAAGGGCCTCGAATGGG
TGTCCTACATCTCCCCCTCTGGCGGCCACACCATCTACGCCGACTCCGTGAAGGGCCGGTTCACCATCTCC
CGGGACAACTCCAAGAACACCCTGTATCTGCAGATGAACTCCCTGAGGGCCGAGGACACCGCCGTGTACTA
CTGCGCCAGGGTGGCCAGAGGAATCGCCGCCAGGTCCCGGACCTCCTACTTCGACTACTGGGGCCAGGGCA
CCCTGGTGACCGTGTCCTCC
559A-X0115-A03 HV
GAGGTGCAATTGCTGGAATCCGGCGGAGGACTGGTGCAGCCTGGCGGCTCCCTGAGACTGTCTTGCGCCGC
CTCCGGCTTTACCTTCTCCCACTACATCATGATGTGGGTGCGACAGGCTCCAGGCAAGGGCCTGGAATGGG
TGTCCGGCATCTACTCCTCCGGCGGCATCACCGTGTACGCCGACTCCGTGAAGGGCCGGTTCACCATCTCC
CGGGACAACTCCAAGAACACCCTGTACCTGCAGATGAACTCCCTGCGGGCCGAGGACACCGCCGTGTACTA
CTGTGCCTGGCGGAGAATCGGCGTGCCCAGACGGGACTCCTTCGACATGTGGGGACAGGGCACCATGGTGA
CAGTGTCCTCC
559A-X0115-B07 HV
GAGGTGCAATTGCTGGAATCCGGCGGAGGACTGGTGCAGCCTGGCGGCTCCCTGAGACTGTCTTGCGCCGC
CTCCGGCTTCACCTTCTCCCACTACCTGATGACCTGGGTGCGACAGGCTCCTGGCAAAGGCCTGGAATGGG
TGTCCTACATCTCCCCCTCTGGCGGCCACACCATCTACGCCGACTCCGTGAAGGGCCGGTTTACCATCTCC
CGGGACAACTCCAAGAACACCCTGTACCTGCAGATGAACTCCCTGCGGGCCGAGGACACCGCCGTGTACTA
CTGTGCCATGGTCGGCCAGGGAATCCGGGGCAGATCCCGGACCTCCTACTTCGCCCAGTGGGGCCAGGGCA
CCCTGGTGACAGTGTCCTCT
559A-X0115-D01 HV
GAGGTGCAATTGCTGGAATCCGGCGGAGGACTGGTGCAGCCTGGCGGCTCCCTGAGACTGTCTTGCGCCGC
CTCCGGCTTCACCTTCTCCATCTACTCCATGCACTGGGTGCGACAGGCTCCAGGCAAGGGCCTGGAATGGG
TGTCCTCCATCTACCCCTCCCGGGGCATGACTTGGTACGCCGACTCCGTGAAGGGCCGGTTCACAATCTCC
CGGGACAACTCCAAGAACACCCTGTACCTGCAGATGAACTCCCTGCGGGCCGAGGACACCGCCGTGTACTA
CTGCGCCTACCGGCGGACCGGCATCCCTAGACGGGACGCCTTCGACATCTGGGGGCAGGGCACCATGGTGA
CAGTGTCCTCC
559A-X0115-D05 HV
GAGGTGCAATTGCTGGAATCCGGCGGTGGACTGGTGCAGCCTGGCGGCTCCCTGAGACTGTCTTGCGCCGC
CTCCGGCTTCACCTTCTCCGACTACATGATGGCCTGGGTGCGACAGGCCCCTGGCAAGGGACTGGAATGGG
TGTCCTCCATCGTGCCCTCTGGCGGCCACACCCACTACGCCGACTCCGTGAAGGGCCGGTTCACCATCTCC
CGGGACAACTCCAAGAACACCCTGTACCTGCAGATGAACTCCCTGCGGGCCGAGGACACCGCCGTGTACTA
CTGCGCCAGAGTGGCCAGAGGAATCGCCGCCAGATCCCGGACCTCCTACTTCGACTACTGGGGCCAGGGCA
CCCTGGTGACAGTGTCCTCC
559A-X0115-E09 HV
GAGGTGCAATTGCTGGAATCCGGCGGAGGACTGGTGCAGCCTGGCGGCTCCCTGAGACTGTCTTGCGCCGC
CTCCGGCTTCACCTTCTCCCACTACCTGATGACCTGGGTGCGACAGGCTCCTGGCAAAGGCCTGGAATGGG
TGTCCTACATCTCCCCCTCTGGCGGCCACACCATCTACGCCGACTCCGTGAAGGGCCGGTTTACCATCTCC
CGGGACAACTCCAAGAACACCCTGTACCTGCAGATGAACTCCCTGCGGGCCGAGGACACCGCCGTGTACTA
CTGTGCCCGGGTGGCCCAGGGAATCGCCGCCAGATCCCGGACCTCCTCTGTGGATCAGTGGGGCCAGGGCA
CCCTGGTGACAGTGTCCTCT
559A-X0115-F02 HV
GAGGTGCAATTGCTGGAATCCGGCGGAGGACTGGTGCAGCCTGGCGGCTCCCTGAGACTGTCTTGCGCCGC
CTCCGGCTTCACCTTCTCCCACTACATCATGATGTGGGTGCGACAGGCTCCTGGCAAGGGGCTGGAATGGG
TGTCCGGCATCTACTCCTCCGGCGGCATCACCGTGTACGCCGACTCCGTGAAGGGCCGGTTCACCATCTCT
CGGGACAACTCCAAGAACACCCTGTACCTGCAGATGAACTCCCTGCGGGCCGAGGACACCGCCGTGTACTA
CTGCGCCTACCGGCGGATCGGCGTGCCCAGACGGGACGAGTTCGACATCTGGGGGCAGGGCACCATGGTGA
CAGTGTCCTCC
559A-X0115-G04 HV
GAGGTGCAATTGCTGGAATCCGGCGGAGGACTGGTGCAGCCTGGCGGCTCCCTGAGACTGTCTTGCGCCGC
CTCCGGCTTCACCTTCTCTCACTACATTATGATGTGGGTGCGACAGGCTCCTGGCAAAGGCCTGGAATGGG
TGTCCGGCATCTACTCCTCCGGCGGCATCACCGTGTACGCCGACTCCGTGAAGGGCCGGTTCACCATCTCC
CGGGACAACTCCAAGAACACCCTGTACCTGCAGATGAACTCCCTGCGGGCCGAGGACACCGCCGTGTACTA
CTGCGCCTACAGACGGACCGGCGTGCCCAGACGGGACGAGTTCGATATCTGGGGGCAGGGCACCATGGTGA
CAGTGTCCTCC
559A-X0115-H06 HV
GAGGTGCAATTGCTGGAATCCGGCGGAGGACTGGTGCAGCCTGGCGGCTCCCTGAGACTGTCTTGCGCCGC
CTCCGGCTTCACCTTCTCCCACTACCTGATGACCTGGGTGCGACAGGCTCCTGGCAAAGGCCTGGAATGGG
TGTCCTACATCTCCCCCTCTGGCGGCCACACCATCTACGCCGACTCCGTGAAGGGCCGGTTTACCATCTCC
CGGGACAACTCCAAGAACACCCTGTACCTGCAGATGAACTCCCTGCGGGCCGAGGACACCGCCGTGTACTA
CTGTGCCCGGGTGGCCCAGGGAATCTCCGCCAGATCCCGGACCTCCTACTTCGATTACTGGGGCCAGGGCA
CCCTGGTGACAGTGTCCTCT
559A-M0006-D09 HV
GAAGTTCAATTGTTAGAGTCTGGTGGCGGTCTTGTTCAGCCTGGTGGTTCTTTACGTCTTTCTTGCGCTGC
TTCCGGATTCACTTTCTCTTTTTACTATATGGTTTGGGTTCGCCAAGCTCCTGGTAAAGGTTTGGAGTGGG
TTTCTGTTATCTATCCTTCTGGTGGCATTACTGTTTATGCTGACTCCGTTAAAGGTCGCTTCACTATCTCT
AGAGACAACTCTAAGAATACTCTCTACTTGCAGATGAACAGCTTAAGGGCTGAGGACACGGCCGTGTATTA
CTGTGCGAGAGATAAATGGGCGGTGATGCCCCCCTACTACTACTACGCTATGGACGTCTGGGGCCAAGGGA
CCACGGTCACCGTCTCAAGC
559A-M0035-G04 HV
GAAGTTCAATTGTTAGAGTCTGGTGGCGGTCTTGTTCAGCCTGGTGGTTCTTTACGTCTTTCTTGCGCTGC
TTCCGGATTCACTTTCTCTTATTACCATATGTCTTGGGTTCGCCAAGCTCCTGGTAAAGGTTTGGAGTGGG
TTTCTGTTATCTCTCCTTCTGGTGGCTCTACTAAGTATGCTGACTCCGTTAAAGGTCGCTTCACTATCTCT
AGAGACAACTCTAAGAATACTCTCTACTTGCAGATGAACAGCTTAAGGGCTGAGGACACTGCAGTCTACTA
TTGTGCGAGAGGCGGTTCGAGCGATTACGCTTGGGGGAGTTATCGTCGACCCTACTACTTTGACTACTGGG
GCCAGGGAACCCTGGTCACCGTCTCAAGC

1.-24. (canceled)

25. An antibody or functional fragment thereof that binds to the active form of human plasma kallikrein and does not bind human prekallikrein.

26. The antibody or functional fragment thereof of claim 25, wherein the antibody or functional fragment thereof binds and inhibits the active form of human plasma kallikrein.

27. An antibody or functional fragment thereof, wherein the antibody or functional fragment thereof binds to active plasma kallikrein and binds to prekallikrein.

28. A human antibody or functional fragment thereof, wherein the antibody or functional fragment binds to human plasma kallikrein.

29. The human antibody or functional fragment thereof of claim 28, wherein the antibody or functional fragment thereof has an apparent inhibition constant (Kᵢₐₚₚ) of plasma kallikrein of less than 1 nM.

30. The antibody of claim 29, wherein the antibody or antigen binding fragment thereof has an on rate of greater than 10⁵ or 10⁶.

31. The antibody of claim 25, wherein the antibody or antigen binding fragment thereof has an on rate of greater than 10⁵ or 10⁶.

32. The antibody or functional fragment thereof of claim 27, wherein the antibody or functional fragment thereof has an apparent inhibition constant (Kᵢₐₚₚ) of plasma kallikrein of less than 1 nM.

33. The antibody of claim 27, wherein the antibody or antigen binding fragment thereof has an on rate of greater than 10⁵ or 10⁶.

34. An antibody or antigen binding fragment thereof that binds the same epitope or competes for binding with an antibody or antibody fragment selected from the group consisting of X81-B01, X63-G06, X101-A01, M162-A04, M160-G12, M142-H08, X63-G06, X101-A01, X67-D03, X67-G04, X115-B07, X115-D05, X115-E09, X115-H06, X115-A03, X115-D01, X115-F02, X115-G04, M29-D09, M145-D11, M06-D09 and M35-G04.

35. The antibody or antigen binding fragment thereof of claim 34, wherein the antibody or antigen binding fragment thereof competes with or binds the same epitope as X81-B01.

36. The antibody or antigen binding fragment thereof of claim 34, wherein the antibody or antigen binding fragment thereof competes with or binds the same epitope as X67-D03.

37. The antibody or antigen binding fragment thereof of claim 34, wherein the antibody or antigen binding fragment thereof competes with or binds the same epitope as X101-A01.

38. The antibody or antigen binding fragment thereof of claim 34, wherein the antibody or antigen binding fragment thereof competes with or binds the same epitope as M162-A04.

39. The antibody or antigen binding fragment thereof of claim 34, wherein the antibody or antigen binding fragment thereof competes with or binds the same epitope as X63-G06.

40. The antibody or antigen binding fragment thereof of claim 34, wherein the antibody or antigen binding fragment thereof binds human plasma kallikrein and murine plasma kallikrein but does not bind human prekallikrein.

41. The antibody or antigen binding fragment thereof of claim 40, wherein the antibody or antigen binding fragment thereof does not bind murine prekallikrein.

42. The antibody or antigen binding fragment thereof of claim 25, wherein the antibody or antigen binding fragment binds one or more of amino acids of: Arg551, Gln553, Tyr555, Thr558, and Arg560 of human plasma kallikrein.

43. The antibody or antigen binding fragment thereof of claim 25, wherein the antibody or antigen binding fragment binds one or more of amino acids of: S478, N481, S525, and K526 of human plasma kallikrein.

44. The antibody or antigen binding fragment thereof of claim 25, wherein the antibody or antigen binding fragment binds one or more of amino acids of: Ser479, Tyr563, and Asp585 of human plasma kallikrein.

45. The antibody or antigen binding fragment thereof of claim 25, wherein the antibody or antigen binding fragment thereof has an apparent inhibition constant (K_{i,app}) of plasma kallikrein of less than 100 nM.

46. The antibody or antigen binding fragment thereof of claim 45, wherein the antibody or antigen binding fragment thereof has an apparent inhibition constant (K_{i,app}) of plasma kallikrein of less than 10 nM.

47. The antibody or antigen binding fragment thereof of claim 46, wherein the antibody or antigen binding fragment thereof has an apparent inhibition constant (K_{i,app}) of plasma kallikrein of less than 1 nM.

48. The antibody or antigen binding fragment thereof of claim 25, wherein the antibody is an IgG or the antigen binding fragment thereof is a soluble Fab (sFab).

49. The antibody or antigen binding fragment thereof of claim 34, wherein the antibody or antigen binding fragment thereof comprises a heavy chain immunoglobulin variable domain sequence and a light chain immunoglobulin variable domain sequence, wherein:
the heavy chain immunoglobulin variable domain sequence comprises three CDR regions from the heavy chain variable domain of an antibody or antibody fragment selected from the group consisting of: M162-A04, M160-G12, M142-H08, X63-G06, X101-A01, X81-B01, X67-D03, X67-G04, X115-B07, X115-D05, X115-E09, X115-H06, X115-A03, X115-D01, X115-F02, X115-G04, M29-D09, M145-D11, M06-D09 and M35-G04,
and/or
the light chain immunoglobulin variable domain sequence comprises three CDR regions from the light chain variable domain of an antibody or antibody fragment selected from the group consisting of M162-A04, M160-G12, M142-H08, X63-G06, X101-A01, X81-B01, X67-D03, X67-G04, X115-B07, X115-D05, X115-E09, X115-H06, X115-A03, X115-D01, X115-F02, X115-G04, M29-D09, M145-D11, M06-D09 and M35-G04.

50. The antibody or antigen binding fragment thereof of claim 49, wherein the antibody or antigen binding fragment thereof comprises three CDR regions from the heavy chain variable domain of X81-B01 and/or three CDR regions from the light chain variable domain of X81-B01.

51. The antibody or antigen binding fragment thereof of claim 49, wherein the antibody or antigen binding fragment thereof comprises three CDR regions from the heavy chain variable domain of X67-D03 and/or three CDR regions from the light chain variable domain of X67-D03.

52. The antibody or antigen binding fragment thereof of claim 49, wherein the antibody or antigen binding fragment thereof comprises three CDR regions from the heavy chain variable domain of X101-A01 and/or three CDR regions from the light chain variable domain of X101-A01.

53. The antibody or antigen binding fragment thereof of claim 49, wherein the antibody or antigen binding fragment thereof comprises three CDR regions from the heavy chain variable domain of X63-G06 and/or three CDR regions from the light chain variable domain of X63-G06.

54. The antibody or antigen binding fragment thereof of claim 49, wherein the antibody or antigen binding fragment thereof comprises three CDR regions from the heavy chain variable domain of M162-A04 and/or three CDR regions from the light chain variable domain of M162-A04.

55. The antibody or antigen binding fragment thereof of claim 49, wherein the heavy chain variable region comprises the heavy chain variable domain of X81-B01, X63-G06, X101-A01, M162-A04, M160-G12, M142-H08, X67-D03, X67-G04, X115-B07, X115-D05, X115-E09, X115-H06, X115-A03, X115-D01, X115-F02, X115-G04, M29-D09, M145-D11, M06-D09 and M35-G04, and/or the light chain variable region comprises the light chain variable domain of X81-B01, X63-G06, X101-A01, M162-A04, M160-G12, M142-H08, X67-D03, X67-G04, X115-B07, X115-D05, X115-E09, X115-H06, X115-A03, X115-D01, X115-F02, X115-G04, M29-D09, M145-D11, M06-D09 and M35-G04.

56. The antibody or antigen binding fragment thereof of claim 25, wherein the antibody or antigen binding fragment thereof competes for binding to active plasma kallikrein with epi-Kal2.

57. The antibody or antigen binding fragment thereof of claim 25, wherein the antibody or antigen binding fragment thereof competes for binding to active plasma kallikrein with AEBSF.

58. The antibody or functional fragment thereof of claim 25, wherein the antibody or functional fragment thereof binds and inhibits plasma kallikrein.

59. A pharmaceutical composition comprising the antibody or antigen binding fragment thereof of claim 25 and a pharmaceutically acceptable carrier.

60. A method of treating or preventing a plasma kallikrein associated disorder in a subject, the method comprising:
administering an antibody or antigen binding fragment thereof of claim 25 to the subject.

61. The method of claim 60, wherein the plasma kallikrein associated disorder is selected from the group consisting of edema rheumatoid arthritis, gout, intestinal bowel disease, oral mucositis, neuropathic pain, inflammatory pain, spinal stenosis-degenerative spine disease, arterial or venous thrombosis, post operative ileus, aortic aneurysm, osteoarthritis, vasculitis, hereditary angioedema, cerebral edema, pulmonary embolism, stroke, clotting on ventricular assistance devices or stents, head trauma or peri-tumor brain edema, sepsis, acute middle cerebral artery (MCA) ischemic event (stroke), restenosis (e.g., after angioplasty), systemic lupus erythematosis nephritis, and burn injury.

62. A method of detecting plasma kallikrein in a subject, the method comprising:
administering an antibody or antigen binding fragment thereof of claim 25 to a subject;
and detecting an interaction between the protein and the plasma kallikrein in the subject, if present.

The application's sequence listing, which the Patent Office published only in electronic form, follows.

SEQUENCE LISTING (2459 sequences)

SEQ ID NO: 1 - protein, 618 aa, Homo sapiens
  MOD_RES (371)..(371): Any amino acid
GCLTQLYENAFFRGGDVASMYTPNAQYCQMRCTFHPRCLLFSFLPASSINDMEKRFGCFLKDSVTGTLPKVHRTGAVSGHSLKQCGHQISACHRDIYKGVDMRGVNFNVSKVSSVEECQKRCTSNIRCQFFSYATQTFHKAEYRNNCLLKYSPGGTPTAIKVLSNVESGFSLKPCALSEIGCHMNIFQHLAFSDVDVARVLTPDAFVCRTICTYHPNCLFFTFYTNVWKIESQRNVCLLKTSESGTPSSSTPQENTISGYSLLTCKRTLPEPCHSKIYPGVDFGGEELNVTFVKGVNVCQETCTKMIRCQFFTYSLLPEDCKEEKCKCFLRLSMDGSPTRIAYGTQGSSGYSLRLCNTGDNSVCTTKTSTXVGGTNSSWGEWPWQVSLQVKLTAQRHLCGGSLIGHQWVLTAAHCFDGLPLQDVWRIYSGILNLSDITKDTPFSQIKEIIIHQNYKVSEGNHDIALIKLQAPLNYTEFQKPICLPSKGDTSTIYTNCWVTGWGFSKEKGEIQNILQKVNIPLVTNEECQKRYQDYKITQRMVCAGYKEGGKDACKGDSGGPLVCKHNGMWRLVGITSWGEGCARREQPGVYTKVAEYMDWILEKTQSSDGKAQMQSPA

SEQ ID NO: 2 - protein, 638 aa, Homo sapiens
MILFKQATYFISLFATVSCGCLTQLYENAFFRGGDVASMYTPNAQYCQMRCTFHPRCLLFSFLPASSINDMEKRFGCFLKDSVTGTLPKVHRTGAVSGHSLKQCGHQISACHRDIYKGVDMRGVNFNVSKVSSVEECQKRCTSNIRCQFFSYATQTFHKAEYRNNCLLKYSPGGTPTAIKVLSNVESGFSLKPCALSEIGCHMNIFQHLAFSDVDVARVLTPDAFVCRTICTYHPNCLFFTFYTNVWKIESQRNVCLLKTSESGTPSSSTPQENTISGYSLLTCKRTLPEPCHSKIYPGVDFGGEELNVTFVKGVNVCQETCTKMIRCQFFTYSLLPEDCKEEKCKCFLRLSMDGSPTRIAYGTQGSSGYSLRLCNTGDNSVCTTKTSTRIVGGTNSSWGEWPWQVSLQVKLTAQRHLCGGSLIGHQWVLTAAHCFDGLPLQDVWRIYSGILNLSDITKDTPFSQIKEIIIHQNYKVSEGNHDIALIKLQAPLNYTEFQKPICLPSKGDTSTIYTNCWVTGWGFSKEKGEIQNILQKVNIPLVTNEECQKRYQDYKITQRMVCAGYKEGGKDACKGDSGGPLVCKHNGMWRLVGITSWGEGCARREQPGVYTKVAEYMDWILEKTQSSDGKAQMQSPA

SEQ ID NO: 3 - DNA, 2252 bp, Homo sapiens
agaacagcttgaagaccgttcatttttaagtgacaagagactcacctccaagaagcaattgtgttttcagaatgattttattcaagcaagcaacttatttcatttccttgtttgctacagtttcctgtggatgtctgactcaactctatgaaaacgccttcttcagaggtggggatgtagcttccatgtacaccccaaatgcccaatactgccagatgaggtgcacattccacccaaggtgtttgctattcagttttcttccagcaagttcaatcaatgacatggagaaaaggtttggttgcttcttgaaagatagtgttacaggaaccctgccaaaagtacatcgaacaggtgcagtttctggacattccttgaagcaatgtggtcatcaaataagtgcttgccatcgagacatttataaaggagttgatatgagaggagtcaattttaatgtgtctaaggttagcagtgttgaagaatgccaaaaaaggtgcaccagtaacattcgctgccagtttttttcatatgccacgcaaacatttcacaaggcagagtaccggaacaattgcctattaaagtacagtcccggaggaacacctaccgctataaaggtgctgagtaacgtggaatctggattctcactgaagccctgtgccctttcagaaattggttgccacatgaacatcttccagcatcttgcgttctcagatgtggatgttgccagggttctcactccagatgcttttgtgtgtcggaccatctgcacctatcaccccaactgcctcttctttacattctatacaaatgtatggaaaatcgagtcacaaagaaatgtttgtcttcttaaaacatctgaaagtggcacaccaagttcctctactcctcaagaaaacaccatatctggatatagccttttaacctgcaaaagaactttacctgaaccctgccattctaaaatttacccgggagttgactttggaggagaagaattgaatgtgacttttgttaaaggagtgaatgtttgccaagagacttgcacaaagatgattcgctgtcagtttttcacttattctttactcccagaagactgtaaggaagagaagtgtaagtgtttcttaagattatctatggatggttctccaactaggattgcgtatgggacacaagggagctctggttactctttgagattgtgtaacactggggacaactctgtctgcacaacaaaaacaagcacacgcattgttggaggaacaaactcttcttggggagagtggccctggcaggtgagcctgcaggtgaagctgacagctcagaggcacctgtgtggagggtcactcataggacaccagtgggtcctcactgctgcccactgctttgatgggcttcccctgcaggatgtttggcgcatctatagtggcattttaaatctgtcagacattacaaaagatacacctttctcacaaataaaagagattattattcaccaaaactataaagtctcagaagggaatcatgatatcgccttgataaaactccaggctcctttgaattacactgaattccaaaaaccaatatgcctaccttccaaaggtgacacaagcacaatttataccaactgttgggtaaccggatggggcttctcgaaggagaaaggtgaaatccaaaatattctacaaaaggtaaatattcctttggtaacaaatgaagaatgccagaaaagatatcaagattataaaataacccaacggatggtctgtgctggctataaagaagggggaaaagatgcttgtaagggagattcaggtggtcccttagtttgcaaacacaatggaatgtggcgtttggtgggcatcaccagctggggtgaaggctgtgcccgcagggagcaacctggtgtctacaccaaagtcgctgagtacatggactggattttagagaaaacacagagcagtgatggaaaagctcagatgcagtcaccagcatgagaagcagtccagagtctaggcaatttttacaacctgagttcaagtcaaattctgagcctggggggtcctcatctgcaaagcatggagagtggcatcttctttgcatcctaaggacgaaaaacacagtgcactcagagctgctgaggacaatgtctggctgaagcccgctttcagcacgccgtaaccaggggctgacaatgcgaggtcgcaactgagatctccatgactgtgtgttgtgaaataaaatggtgaaagatcaaaaaa

SEQ ID NO: 4 - protein, 638 aa, Mus musculus
MILFNRVGYFVSLFATVSCGCMTQLYKNTFFRGGDLAAIYTPDAQYCQKMCTFHPRCLLFSFLAVTPPKETNKRFGCFMKESITGTLPRIHRTGAISGHSLKQCGHQISACHRDIYKGLDMRGSNFNISKTDNIEECQKLCTNNFHCQFFTYATSAFYRPEYRKKCLLKHSASGTPTSIKSADNLVSGFSLKSCALSEIGCPMDIFQHSAFADLNVSQVITPDAFVCRTICTFHPNCLFFTFYTNEWETESQRNVCFLKTSKSGRPSPPIPQENAISGYSLLTCRKTRPEPCHSKIYSGVDFEGEELNVTFVQGADVCQETCTKTIRCQFFIYSLLPQDCKEEGCKCSLRLSTDGSPTRITYGMQGSSGYSLRLCKLVDSPDCTTKINARIVGGTNASLGEWPWQVSLQVKLVSQTHLCGGSIIGRQWVLTAAHCFDGIPYPDVWRIYGGILSLSEITKETPSSRIKELIIHQEYKVSEGNYDIALIKLQTPLNYTEFQKPICLPSKADTNTIYTNCWVTGWGYTKEQGETQNILQKATIPLVPNEECQKKYRDYVINKQMICAGYKEGGTDACKGDSGGPLVCKHSGRWQLVGITSWGEGCGRKDQPGVYTKVSEYMDWILEKTQSSDVRALETSSA

SEQ ID NO: 5 - DNA, 2472 bp, Mus musculus
agaccgccctcggtgccatattcagagggcttgaagaccatcttcatgtgaagactccctctcctccagaaccacaacgtgaccatccttccaggatgattttattcaaccgagtgggttattttgtttccttgtttgctaccgtctcctgtgggtgtatgactcaactgtataaaaataccttcttcagaggtggggatctagctgccatctacaccccagatgcccagtactgtcagaagatgtgcacttttcaccccaggtgcctgctgttcagctttctcgccgtgactccacccaaagagacaaataaacggtttggttgcttcatgaaagagagcattacagggactttgccaagaatacaccggacaggggccatttctggtcattctttaaagcagtgtggccatcaaataagtgcttgccaccgagacatatacaaaggacttgatatgagagggtccaactttaatatctctaagaccgacaatattgaagaatgccagaaactgtgcacaaataattttcactgccaatttttcacatatgctacaagtgcattttacagaccagagtaccggaagaagtgcctgctgaagcacagtgcaagcggaacacccaccagcataaagtcagcggacaacctggtgtctggattctcactgaagtcctgtgcgctttcggagataggttgccccatggatattttccagcactctgcctttgcagacctgaatgtaagccaggtcatcacccccgatgcctttgtgtgtcgcaccatctgcaccttccatcccaactgccttttcttcacgttctacacgaatgaatgggagacagaatcacagagaaatgtttgttttcttaagacgtctaaaagtggaagaccaagtccccctattcctcaagaaaacgctatatctggatatagtctcctcacctgcagaaaaactcgccctgaaccctgccattccaaaatttactctggagttgactttgaaggggaagaactgaatgtgaccttcgtgcaaggagcagatgtctgccaagagacttgtacaaagacaatccgctgccagttttttatttactccttactcccccaagactgcaaggaggaggggtgtaaatgttccttaaggttatccacagatggctccccaactaggatcacctatggcatgcaggggagctccggttattctctgagattgtgtaaacttgtggacagccctgactgtacaacaaaaataaatgcacgtattgtgggaggaacaaacgcttctttaggggagtggccatggcaggtcagcctgcaagtgaagctggtatctcagacccatttgtgtggagggtccatcattggtcgccaatgggtactgacagctgcccattgctttgatggaattccctatccagatgtgtggcgtatatatggcggaattcttagtctgtccgagattacgaaagaaacgccttcctcgagaataaaggagcttattattcatcaggaatacaaagtctcagaaggcaattatgatattgccttaataaagcttcagacgcccctgaattatactgaattccaaaaaccaatatgcctgccttccaaagctgacacaaatacaatttataccaactgttgggtgactggatggggctacacgaaggaacaaggtgaaacgcaaaatattctacaaaaggctactattcctttggtaccaaatgaagaatgccagaaaaaatacagagattatgttataaacaagcagatgatctgtgctggctacaaagaaggcggaacagacgcttgtaagggagattccggtggccccttagtctgtaaacacagtggacggtggcagttggtgggtatcaccagctggggtgaaggctgcgcccgcaaggaccaaccaggagtctacaccaaagtttctgagtacatggactggatattggagaagacacagagcagtgatgtaagagctctggagacatcttcagcctgaggaggctgggtaccaaggaggaagaacccagctggctttaccacctgccctcaaggcaaactagagctccaggattctcggctgtaaaatgttgataatggtgtctacctcacatccgtatcattggattgaaaattcaagtgtagatatagttgctgaagacagcgttttgctcaagtgtgtttcctgccttgagtcacaggagctccaatgggagcattacaaagatcaccaagcttgttaggaaagagaatgatcaaagggttttattaggtaatgaaatgtctagatgtgatgcaattgaaaaaaagaccccagattctagcacagtccttgggaccattctcatgtaactgttgactctggacctcagcagatctcagagttacctgtccacttctgacatttgtttattagagcctgatgctattctttcaagtggagcaaaaaaaaaaaaaaa

SEQ ID NO: 6 - protein, 638 aa, Rattus norvegicus
MILFKQVGYFVSLFATVSCGCLSQLYANTFFRGGDLAAIYTPDAQHCQKMCTFHPRCLLFSFLAVSPTKETDKRFGCFMKESITGTLPRIHRTGAISGHSLKQCGHQLSACHQDIYEGLDMRGSNFNISKTDSIEECQKLCTNNIHCQFFTYATKAFHRPEYRKSCLLKRSSSGTPTSIKPVDNLVSGFSLKSCALSEIGCPMDIFQHFAFADLNVSHVVTPDAFVCRTVCTFHPNCLFFTFYTNEWETESQRNVCFLKTSKSGRPSPPIIQENAVSGYSLFTCRKARPEPCHFKIYSGVAFEGEELNATFVQGADACQETCTKTIRCQFFTYSLLPQDCKAEGCKCSLRLSTDGSPTRITYEAQGSSGYSLRLCKVVESSDCTTKINARIVGGTNSSLGEWPWQVSLQVKLVSQNHMCGGSIIGRQWILTAAHCFDGIPYPDVWRIYGGILNLSEITNKTPFSSIKELIIHQKYKMSEGSYDIALIKLQTPLNYTEFQKPICLPSKADTNTIYTNCWVTGWGYTKERGETQNILQKATIPLVPNEECQKKYRDYVITKQMICAGYKEGGIDACKGDSGGPLVCKHSGRWQLVGITSWGEGCARKEQPGVYTKVAEYIDWILEKIQSSKERALETSPA

SEQ ID NO: 7 - DNA, 2513 bp, Rattus norvegicus
tgaagactagcttcatgtgaagactccttctcctccagcagcacaaagcaaccatccttccaggatgattttattcaaacaagtgggttattttgtttccttgttcgctacagtttcctgtgggtgtctgtcacaactgtatgcaaataccttcttcagaggtggggatctggctgccatctacaccccggatgcccagcactgtcagaagatgtgcacgtttcaccccaggtgcctgctcttcagcttccttgccgtgagtccaaccaaggagacagataaaaggtttgggtgcttcatgaaagagagcattacagggactttgccaagaatacaccggacaggggccatttctggtcattctttaaaacagtgtggccatcaattaagtgcttgccaccaagacatatacgaaggactggatatgagagggtccaactttaatatatctaagaccgacagtattgaagaatgccagaaactgtgcacaaataatattcactgccaatttttcacatatgctacaaaagcatttcacagaccagagtacaggaagagttgcctgctgaagcgcagttcaagtggaacgcccaccagtataaagccagtggacaacctggtgtctggattctcactgaagtcctgtgctctctcagagatcggttgccccatggatattttccagcactttgcctttgcagacctgaatgtaagccatgtcgtcacccccgatgccttcgtgtgtcgcaccgtttgcaccttccatcccaactgcctcttcttcacattctacacgaatgagtgggagacggaatcacagaggaatgtttgttttcttaagacatctaaaagtggaagaccaagtccccctattattcaagaaaatgctgtatctggatacagtctcttcacctgcagaaaagctcgccctgaaccctgccatttcaagatttactctggagttgccttcgaaggggaagaactgaacgcgaccttcgtgcagggagcagatgcgtgccaagagacttgtacaaagaccatccgctgtcagttttttacttactcattgcttccccaagactgcaaggcagaggggtgtaaatgttccttaaggttatccacggatggctctccaactaggatcacctatgaggcacaggggagctctggttattctctgagactgtgtaaagttgtggagagctctgactgtacgacaaaaataaatgcacgtattgtgggaggaacaaactcttctttaggagagtggccatggcaggtcagcctgcaagtaaagttggtttctcagaatcatatgtgtggagggtccatcattggacgccaatggatactgacggctgcccattgctttgatgggattccctatccagacgtgtggcgtatatatggcgggattcttaatctgtcagagattacaaacaaaacgcctttctcaagtataaaggagcttattattcatcagaaatacaaaatgtcagaaggcagttacgatattgccttaataaagcttcagacaccgttgaattatactgaattccaaaaaccaatatgcctgccttccaaagctgacacaaatacaatttataccaactgctgggtgactggatggggctacacaaaggaacgaggtgagacccaaaatattctacaaaaggcaactattcccttggtaccaaatgaagaatgccagaaaaaatatagagattatgttataaccaagcagatgatctgtgctggctacaaagaaggtggaatagatgcttgtaagggagattccggtggccccttagtttgcaaacatagtggaaggtggcagttggtgggtatcaccagctggggcgaaggctgtgcccgcaaggagcaaccaggagtctacaccaaagttgctgagtacattgactggatattggagaagatacagagcagcaaggaaagagctctggagacatctccagcatgaggaggctgggtactgatggggaagagcccagctggcaccagctttaccacctgccctcaagtcctactagagctccagagttctcttctgcaaaatgtcgatagtggtgtctacctcgcatccttaccataggattaaaagtccaaatgtagacacagttgctaaagacagcgccatgctcaagcgtgcttcctgccttgagcaacaggaacgccaatgagaactatccaaagattaccaagcctgtttggaaataaaatggtcaaaggatttttattaggtagtgaaattaggtagttgtccttggaaccattctcatgtaactgttgactctggacctcagcagatcacagttaccttctgtccacttctgacatttgtgtactggaacctgatgctgttcttccacttggagcaaagaactgagaaacctggttctatccattgggaaaaagagatctttgtaacatttcctttacaataaaaagatgttctacttggacttgaaaaaaaaaaaaaaaaaaaaaaaaaa

SEQ ID NO: 8 - protein, 11 aa, Artificial Sequence
  Description of Artificial Sequence: Synthetic peptide
RASQSIRNYLN

SEQ ID NO: 9 - protein, 7 aa, Artificial Sequence
  Description of Artificial Sequence: Synthetic peptide
AASTLQS

SEQ ID NO: 10 - protein, 9 aa, Artificial Sequence
  Description of Artificial Sequence: Synthetic peptide
QQLSGYPHT

SEQ ID NO: 11 - protein, 5 aa, Artificial Sequence
  Description of Artificial Sequence: Synthetic peptide
FYYMV

SEQ ID NO: 12 - protein, 17 aa, Artificial Sequence
  Description of Artificial Sequence: Synthetic peptide
VIYPSGGITVYADSVKG

SEQ ID NO: 13 - protein, 16 aa, Artificial Sequence
  Description of Artificial Sequence: Synthetic peptide
DKWAVMPPYYYYAMDV

SEQ ID NO: 14 - protein, 14 aa, Artificial Sequence
  Description of Artificial Sequence: Synthetic peptide
TGTNSDVGNYNLVS

SEQ ID NO: 15 - protein, 7 aa, Artificial Sequence
  Description of Artificial Sequence: Synthetic peptide
EVNKRPS

SEQ ID NO: 16 - protein, 11 aa, Artificial Sequence
  Description of Artificial Sequence: Synthetic peptide
CSYAGNRNFYV

SEQ ID NO: 17 - protein, 5 aa, Artificial Sequence
  Description of Artificial Sequence: Synthetic peptide
WYSMV

SEQ ID NO: 18 - protein, 17 aa, Artificial Sequence
  Description of Artificial Sequence: Synthetic peptide
SISPSGGLTNYADSVKG

SEQ ID NO: 19 - protein, 14 aa, Artificial Sequence
  Description of Artificial Sequence: Synthetic peptide
HTAARPFYYYYMDV

SEQ ID NO: 20 - protein, 11 aa, Artificial Sequence
  Description of Artificial Sequence: Synthetic peptide
SGDKLGDKYAC

SEQ ID NO: 21 - protein, 7 aa, Artificial Sequence
  Description of Artificial Sequence: Synthetic peptide
QDSKRPS

SEQ ID NO: 22 - protein, 9 aa, Artificial Sequence
  Description of Artificial Sequence: Synthetic peptide
QAWDSSTGV

SEQ ID NO: 23 - protein, 5 aa, Artificial Sequence
  Description of Artificial Sequence: Synthetic peptide
WYLMI

SEQ ID NO: 24 - protein, 17 aa, Artificial Sequence
  Description of Artificial Sequence: Synthetic peptide
YIYPSGGFTYYADSVKG

SEQ ID NO: 25 - protein, 13 aa, Artificial Sequence
  Description of Artificial Sequence: Synthetic peptide
TEGPLSWGYGMDV

SEQ ID NO: 26 - protein, 11 aa, Artificial Sequence
  Description of Artificial Sequence: Synthetic peptide
SGDKLGNKYAY

SEQ ID NO: 27 - protein, 7 aa, Artificial Sequence
  Description of Artificial Sequence: Synthetic peptide
QDNNRPS

SEQ ID NO: 28 - protein, 9 aa, Artificial Sequence
  Description of Artificial Sequence: Synthetic peptide
QAWDSRTVV

SEQ ID NO: 29 - protein, 5 aa, Artificial Sequence
  Description of Artificial Sequence: Synthetic peptide
TYFML

SEQ ID NO: 30 - protein, 17 aa, Artificial Sequence
  Description of Artificial Sequence: Synthetic peptide
SIYPSGGNTVYADSVKG

SEQ ID NO: 31 - protein, 15 aa, Artificial Sequence
  Description of Artificial Sequence: Synthetic peptide
AASPVRNYYYYGMDV

SEQ ID NO: 32 - protein, 11 aa, Artificial Sequence
  Description of Artificial Sequence: Synthetic peptide
RASQSISVYLN

SEQ ID NO: 33 - protein, 7 aa, Artificial Sequence
  Description of Artificial Sequence: Synthetic peptide
GASNLQF

SEQ ID NO: 34 - protein, 8 aa, Artificial Sequence
  Description of Artificial Sequence: Synthetic peptide
QQTFSLFT

SEQ ID NO: 35 - protein, 5 aa, Artificial Sequence
  Description of Artificial Sequence: Synthetic peptide
FYNMN

SEQ ID NO: 36 - protein, 17 aa, Artificial Sequence
  Description of Artificial Sequence: Synthetic peptide
SISPSGGETNYADSVKG

SEQ ID NO: 37 - protein, 15 aa, Artificial Sequence
  Description of Artificial Sequence: Synthetic peptide
GGGAYRNNWWGGFDI

SEQ ID NO: 38 - protein, 12 aa, Artificial Sequence
  Description of Artificial Sequence: Synthetic peptide
RASQSVSSSYLA

SEQ ID NO: 39 - protein, 7 aa, Artificial Sequence
  Description of Artificial Sequence: Synthetic peptide
GASSRAT

SEQ ID NO: 40 - protein, 9 aa, Artificial Sequence
  Description of Artificial Sequence: Synthetic peptide
QQYGSSPFT

SEQ ID NO: 41 - protein, 5 aa, Artificial Sequence
  Description of Artificial Sequence: Synthetic peptide
PYNMY

SEQ ID NO: 42 - protein, 17 aa, Artificial Sequence
  Description of Artificial Sequence: Synthetic peptide
SIRPSGGGTVYADSVKG

SEQ ID NO: 43 - protein, 12 aa, Artificial Sequence
  Description of Artificial Sequence: Synthetic peptide
GFIAARWYYFDY

SEQ ID NO: 44 - protein, 11 aa, Artificial Sequence
  Description of Artificial Sequence: Synthetic peptide
SGDQLGDKYVG

SEQ ID NO: 45 - protein, 7 aa, Artificial Sequence
  Description of Artificial Sequence: Synthetic peptide
QDTKRPS

SEQ ID NO: 46 - protein, 9 aa, Artificial Sequence
  Description of Artificial Sequence: Synthetic peptide
QAWDTSTAG

SEQ ID NO: 47 - protein, 5 aa, Artificial Sequence
  Description of Artificial Sequence: Synthetic peptide
WYTMV

SEQ ID NO: 48 - protein, 17 aa, Artificial Sequence
  Description of Artificial Sequence: Synthetic peptide
RIYPSGGWTKYADSVKG

SEQ ID NO: 49 - protein, 13 aa, Artificial Sequence
  Description of Artificial Sequence: Synthetic peptide
EGLLWFGENAFDI

SEQ ID NO: 50 - protein, 11 aa, Artificial Sequence
  Description of Artificial Sequence: Synthetic peptide
SGDKLGDKYAC

SEQ ID NO: 51 - protein, 7 aa, Artificial Sequence
  Description of Artificial Sequence: Synthetic peptide
QDSKRPS

SEQ ID NO: 52 - protein, 9 aa, Artificial Sequence
  Description of Artificial Sequence: Synthetic peptide
QAWDSSTGV

SEQ ID NO: 53 - protein, 5 aa, Artificial Sequence
  Description of Artificial Sequence: Synthetic peptide
WYLMI

SEQ ID NO: 54 - protein, 17 aa, Artificial Sequence
  Description of Artificial Sequence: Synthetic peptide
YIYPSGGFTYYADSVKG

SEQ ID NO: 55 - protein, 13 aa, Artificial Sequence
  Description of Artificial Sequence: Synthetic peptide
TEGPLSWGYGMDV

SEQ ID NO: 56 - protein, 11 aa, Artificial Sequence
  Description of Artificial Sequence: Synthetic peptide
SGDQLGDKYVG

SEQ ID NO: 57 - protein, 7 aa, Artificial Sequence
  Description of Artificial Sequence: Synthetic peptide
QDTKRPS

SEQ ID NO: 58 - protein, 9 aa, Artificial Sequence
  Description of Artificial Sequence: Synthetic peptide
QAWDTSTAG

SEQ ID NO: 59 - protein, 5 aa, Artificial Sequence
  Description of Artificial Sequence: Synthetic peptide
WYTMV

SEQ ID NO: 60 - protein, 17 aa, Artificial Sequence
  Description of Artificial Sequence: Synthetic peptide
RIYPSGGWTKYADSVKG

SEQ ID NO: 61 - protein, 13 aa, Artificial Sequence
  Description of Artificial Sequence: Synthetic peptide
EGLLWFGENAFDI

SEQ ID NO: 62 - protein, 11 aa, Artificial Sequence
  Description of Artificial Sequence: Synthetic peptide
SGNKLGDKYVA

SEQ ID NO: 63 - protein, 7 aa, Artificial Sequence
  Description of Artificial Sequence: Synthetic peptide
QDTKRPS

SEQ ID NO: 64 - protein, 9 aa, Artificial Sequence
  Description of Artificial Sequence: Synthetic peptide
QAWDSSIVI

SEQ ID NO: 65 - protein, 5 aa, Artificial Sequence
  Description of Artificial Sequence: Synthetic peptide
WYTMV

SEQ ID NO: 66 - protein, 17 aa, Artificial Sequence
  Description of Artificial Sequence: Synthetic peptide
YIYPSGGATFYADSVKG

SEQ ID NO: 67 - protein, 13 aa, Artificial Sequence
  Description of Artificial Sequence: Synthetic peptide
GSYDYIWGFYSDH

SEQ ID NO: 68 - protein, 11 aa, Artificial Sequence
  Description of Artificial Sequence: Synthetic peptide
SGDNLGNKYNS

SEQ ID NO: 69 - protein, 7 aa, Artificial Sequence
  Description of Artificial Sequence: Synthetic peptide
QDTKRPS

SEQ ID NO: 70 - protein, 8 aa, Artificial Sequence
  Description of Artificial Sequence: Synthetic peptide
QAWDGNVV

SEQ ID NO: 71 - protein, 5 aa, Artificial Sequence
  Description of Artificial Sequence: Synthetic peptide
WYEMG

SEQ ID NO: 72 - protein, 17 aa, Artificial Sequence
  Description of Artificial Sequence: Synthetic peptide
SIYSSGGGTMYADSVKG

SEQ ID NO: 73 - protein, 18 aa, Artificial Sequence
  Description of Artificial Sequence: Synthetic peptide
NPQYSGYDRSLSDGAFDI

SEQ ID NO: 74 - protein, 11 aa, Artificial Sequence
  Description of Artificial Sequence: Synthetic peptide
RASQSVSSYLA

SEQ ID NO: 75 - protein, 7 aa, Artificial Sequence
  Description of Artificial Sequence: Synthetic peptide
DASNRAT

SEQ ID NO: 76 - protein, 11 aa, Artificial Sequence
  Description of Artificial Sequence: Synthetic peptide
QQRSNWPRGFT

SEQ ID NO: 77 - protein, 5 aa, Artificial Sequence
  Description of Artificial Sequence: Synthetic peptide
YYHMS

SEQ ID NO: 78 - protein, 17 aa, Artificial Sequence
  Description of Artificial Sequence: Synthetic peptide
VISPSGGSTKYADSVKG

SEQ ID NO: 79 - protein, 19 aa, Artificial Sequence
  Description of Artificial Sequence: Synthetic peptide
GGSSDYAWGSYRRPYYFDY

SEQ ID NO: 80 - protein, 11 aa, Artificial Sequence
  Description of Artificial Sequence: Synthetic peptide
SGEKLGDKYVS

SEQ ID NO: 81 - protein, 7 aa, Artificial Sequence
  Description of Artificial Sequence: Synthetic peptide
EDSRRPS

SEQ ID NO: 82 - protein, 9 aa, Artificial Sequence
  Description of Artificial Sequence: Synthetic peptide
QAWDSSTAI

SEQ ID NO: 83 - protein, 5 aa, Artificial Sequence
  Description of Artificial Sequence: Synthetic peptide
YYMMV

SEQ ID NO: 84 - protein, 17 aa, Artificial Sequence
  Description of Artificial Sequence: Synthetic peptide
YIYSSGGHTVYADSVKG

SEQ ID NO: 85 - protein, 15 aa, Artificial Sequence
  Description of Artificial Sequence: Synthetic peptide
DLFLYDFWSKGAFDI

SEQ ID NO: 86 - protein, 11 aa, Artificial Sequence
  Description of Artificial Sequence: Synthetic peptide
SGDKLGDKYTS

SEQ ID NO: 87 - protein, 7 aa, Artificial Sequence
  Description of Artificial Sequence: Synthetic peptide
QDIKRPS

SEQ ID NO: 88 - protein, 10 aa, Artificial Sequence
  Description of Artificial Sequence: Synthetic peptide
QAWDSPNARV

SEQ ID NO: 89 - protein, 5 aa, Artificial Sequence
  Description of Artificial Sequence: Synthetic peptide
HYRMS

SEQ ID NO: 90 - protein, 17 aa, Artificial Sequence
  Description of Artificial Sequence: Synthetic peptide
SIYPSGGRTVYADSVKG

SEQ ID NO: 91 - protein, 19 aa, Artificial Sequence
  Description of Artificial Sequence: Synthetic peptide
DKFEWRLLFRGIGNDAFDI

SEQ ID NO: 92 - protein, 13 aa, Artificial Sequence
  Description of Artificial Sequence: Synthetic peptide
SGSSSNIGSNTVS

SEQ ID NO: 93 - protein, 7 aa, Artificial Sequence
  Description of Artificial Sequence: Synthetic peptide
NDHRRPS

SEQ ID NO: 94 - protein, 11 aa, Artificial Sequence
  Description of Artificial Sequence: Synthetic peptide
SAWDDSLNGVV

SEQ ID NO: 95 - protein, 5 aa, Artificial Sequence
  Description of Artificial Sequence: Synthetic peptide
RYEMY

SEQ ID NO: 96 - protein, 17 aa, Artificial Sequence
  Description of Artificial Sequence: Synthetic peptide
SISSSGGPTAYADSVKG

SEQ ID NO: 97 - protein, 20 aa, Artificial Sequence
  Description of Artificial Sequence: Synthetic peptide
GTPKWELLLRSIYIENAFDI

SEQ ID NO: 98 - protein, 15 aa, Artificial Sequence
  Description of Artificial Sequence: Synthetic peptide
RSSQSLSDDGNTYLD

SEQ ID NO: 99 - protein, 7 aa, Artificial Sequence
  Description of Artificial Sequence: Synthetic peptide
TLSYRAS

SEQ ID NO: 100 - protein, 9 aa, Artificial Sequence
  Description of Artificial Sequence: Synthetic peptide
MQGTHWPPT

SEQ ID NO: 101 - protein, 5 aa, Artificial Sequence
  Description of Artificial Sequence: Synthetic peptide
FYAMH

SEQ ID NO: 102 - protein, 17 aa, Artificial Sequence
  Description of Artificial Sequence: Synthetic peptide
GIVPSGGRTHYADSVKG

SEQ ID NO: 103 - protein, 12 aa, Artificial Sequence
  Description of Artificial Sequence: Synthetic peptide
DSSGSPNPLFDY

SEQ ID NO: 104 - protein, 16 aa, Artificial Sequence
  Description of Artificial Sequence: Synthetic peptide
RSSLSLLHSNGYNYLD

SEQ ID NO: 105 - protein, 7 aa, Artificial Sequence
  Description of Artificial Sequence: Synthetic peptide
LSSTRAS

SEQ ID NO: 106 - protein, 9 aa, Artificial Sequence
  Description of Artificial Sequence: Synthetic peptide
MQPLETPPT

SEQ ID NO: 107 - protein, 5 aa, Artificial Sequence
  Description of Artificial Sequence: Synthetic peptide
YYEMD

SEQ ID NO: 108 - protein, 17 aa, Artificial Sequence
  Description of Artificial Sequence: Synthetic peptide
GISSSGGHTAYADSVKG

SEQ ID NO: 109 - protein, 16 aa, Artificial Sequence
  Description of Artificial Sequence: Synthetic peptide
ERRSSSRARYYYGMDV

SEQ ID NO: 110 - protein, 13 aa, Artificial Sequence
  Description of Artificial Sequence: Synthetic peptide
SGNNSNFGSNTVT

SEQ ID NO: 111 - protein, 7 aa, Artificial Sequence
  Description of Artificial Sequence: Synthetic peptide
SDSRRPS

SEQ ID NO: 112 - protein, 10 aa, Artificial Sequence
  Description of Artificial Sequence: Synthetic peptide
AAWDDSLNGV

SEQ ID NO: 113 - protein, 5 aa, Artificial Sequence
  Description of Artificial Sequence: Synthetic peptide
DYRMQ

SEQ ID NO: 114 - protein, 17 aa, Artificial Sequence
  Description of Artificial Sequence: Synthetic peptide
VIVPSGGNTMYADSVKG

SEQ ID NO: 115 - protein, 21 aa, Artificial Sequence
  Description of Artificial Sequence: Synthetic peptide
GGPGSSIAARRAPTGYYGMDV

SEQ ID NO: 116 - protein, 11 aa, Artificial Sequence
  Description of Artificial Sequence: Synthetic peptide
RASQPIDNYLN

SEQ ID NO: 117 - protein, 7 aa, Artificial Sequence
  Description of Artificial Sequence: Synthetic peptide
AASRLQS

SEQ ID NO: 118 - protein, 9 aa, Artificial Sequence
  Description of Artificial Sequence: Synthetic peptide
QQSYTVPYT

SEQ ID NO: 119 - protein, 5 aa, Artificial Sequence
  Description of Artificial Sequence: Synthetic peptide
AYSMI

SEQ ID NO: 120 - protein, 17 aa, Artificial Sequence
  Description of Artificial Sequence: Synthetic peptide
YIRPSGGRTTYADSVKG

SEQ ID NO: 121 - protein, 17 aa, Artificial Sequence
  Description of Artificial Sequence: Synthetic peptide
GGLLLWFRELKSNYFDY

SEQ ID NO: 122 - protein, 11 aa, Artificial Sequence
  Description of Artificial Sequence: Synthetic peptide
RASQSVSSYLA

SEQ ID NO: 123 - protein, 7 aa, Artificial Sequence
  Description of Artificial Sequence: Synthetic peptide
DASNRAT

SEQ ID NO: 124 - protein, 11 aa, Artificial Sequence
  Description of Artificial Sequence: Synthetic peptide
QQRSNWPRGFT

SEQ ID NO: 125 - protein, 5 aa, Artificial Sequence
  Description of Artificial Sequence: Synthetic peptide
YYHMS

SEQ ID NO: 126 - protein, 17 aa, Artificial Sequence
  Description of Artificial Sequence: Synthetic peptide
VISPSGGSTKYADSVKG

SEQ ID NO: 127 - protein, 19 aa, Artificial Sequence
  Description of Artificial Sequence: Synthetic peptide
GGSSDYAWGSYRRPYYFDY

SEQ ID NO: 128 - protein, 11 aa, Artificial Sequence
  Description of Artificial Sequence: Synthetic peptide
SGDKLGDKYTS

SEQ ID NO: 129 - protein, 7 aa, Artificial Sequence
  Description of Artificial Sequence: Synthetic peptide
QDIKRPS

SEQ ID NO: 130 - protein, 10 aa, Artificial Sequence
  Description of Artificial Sequence: Synthetic peptide
QAWDSPNARV

SEQ ID NO: 131 - protein, 5 aa, Artificial Sequence
  Description of Artificial Sequence: Synthetic peptide
HYRMS

SEQ ID NO: 132 - protein, 17 aa, Artificial Sequence
  Description of Artificial Sequence: Synthetic peptide
SIYPSGGRTVYADSVKG

SEQ ID NO: 133 - protein, 19 aa, Artificial Sequence
  Description of Artificial Sequence: Synthetic peptide
DKFEWRLLFRGIGNDAFDI

SEQ ID NO: 134 - protein, 11 aa, Artificial Sequence
  Description of Artificial Sequence: Synthetic peptide
RASGDIGNALG

SEQ ID NO: 135 - protein, 7 aa, Artificial Sequence
  Description of Artificial Sequence: Synthetic peptide
DASTLQS

SEQ ID NO: 136 - protein, 9 aa, Artificial Sequence
  Description of Artificial Sequence: Synthetic peptide
LQGYNYPRT

SEQ ID NO: 137 - protein, 5 aa, Artificial Sequence
  Description of Artificial Sequence: Synthetic peptide
RYIMH

SEQ ID NO: 138 - protein, 17 aa, Artificial Sequence
  Description of Artificial Sequence: Synthetic peptide
SISPSGGLTSYADSVKG

SEQ ID NO: 139 - protein, 15 aa, Artificial Sequence
  Description of Artificial Sequence: Synthetic peptide
EFENAYHYYYYGMDV

SEQ ID NO: 140 - protein, 11 aa, Artificial Sequence
  Description of Artificial Sequence: Synthetic peptide
RASQSISSYLS

SEQ ID NO: 141 - protein, 7 aa, Artificial Sequence
  Description of Artificial Sequence: Synthetic peptide
AASSLQS

SEQ ID NO: 142 - protein, 9 aa, Artificial Sequence
  Description of Artificial Sequence: Synthetic peptide
QQSISIPRT

SEQ ID NO: 143 - protein, 5 aa, Artificial Sequence
  Description of Artificial Sequence: Synthetic peptide
PYFMG

SEQ ID NO: 144 - protein, 17 aa, Artificial Sequence
  Description of Artificial Sequence: Synthetic peptide
GIGPSGGSTTYADSVKG

SEQ ID NO: 145 - protein, 20 aa, Artificial Sequence
  Description of Artificial Sequence: Synthetic peptide
EGPPYSSGWYRGLRQYHFDY

SEQ ID NO: 146 - protein, 11 aa, Artificial Sequence
  Description of Artificial Sequence: Synthetic peptide
RASQGISSYLA

SEQ ID NO: 147 - protein, 7 aa, Artificial Sequence
  Description of Artificial Sequence: Synthetic peptide
AASTLQS

SEQ ID NO: 148 - protein, 9 aa, Artificial Sequence
  Description of Artificial Sequence: Synthetic peptide
QQLNSYPLT

SEQ ID NO: 149 - protein, 5 aa, Artificial Sequence
  Description of Artificial Sequence: Synthetic peptide
HYLMT

SEQ ID NO: 150 - protein, 17 aa, Artificial Sequence
  Description of Artificial Sequence: Synthetic peptide
YISPSGGHTIYADSVKG

SEQ ID NO: 151 - protein, 16 aa, Artificial Sequence
  Description of Artificial Sequence: Synthetic peptide
VARGIAARSRTSYFDY

SEQ ID NO: 152 - protein, 11 aa, Artificial Sequence
  Description of Artificial Sequence: Synthetic peptide
SGDKLGDKYVS

SEQ ID NO: 153 - protein, 7 aa, Artificial Sequence
  Description of Artificial Sequence: Synthetic peptide
QDTKRPS

SEQ ID NO: 154 - protein, 9 aa, Artificial Sequence
  Description of Artificial Sequence: Synthetic peptide
QAWDSSTYV

SEQ ID NO: 155 - protein, 5 aa, Artificial Sequence
  Description of Artificial Sequence: Synthetic peptide
DYAMK

SEQ ID NO: 156 - protein, 17 aa, Artificial Sequence
  Description of Artificial Sequence: Synthetic peptide
SISSSGGVTQYADSVKG

SEQ ID NO: 157 - protein, 21 aa, Artificial Sequence
  Description of Artificial Sequence: Synthetic peptide
EEDYSSSWYSRRFDYYYGMDV

SEQ ID NO: 158 - protein, 11 aa, Artificial Sequence
  Description of Artificial Sequence: Synthetic peptide
RASQSISSWLA

SEQ ID NO: 159 - protein, 7 aa, Artificial Sequence
  Description of Artificial Sequence: Synthetic peptide
KASTLES

SEQ ID NO: 160 - protein, 8 aa, Artificial Sequence
  Description of Artificial Sequence: Synthetic peptide
QQYNTYWT

SEQ ID NO: 161 - protein, 5 aa, Artificial Sequence
  Description of Artificial Sequence: Synthetic peptide
HYIMM

SEQ ID NO: 162 - protein, 17 aa, Artificial Sequence
  Description of Artificial Sequence: Synthetic peptide
GIYSSGGITVYADSVKG

SEQ ID NO: 163 - protein, 13 aa, Artificial Sequence
  Description of Artificial Sequence: Synthetic peptide
RRTGIPRRDAFDI

SEQ ID NO: 164 - protein, 11 aa, Artificial Sequence
  Description of Artificial Sequence: Synthetic peptide
RASQPIDNYLN

SEQ ID NO: 165 - protein, 7 aa, Artificial Sequence
  Description of Artificial Sequence: Synthetic peptide
AASRLQS

SEQ ID NO: 166 - protein, 9 aa, Artificial Sequence
  Description of Artificial Sequence: Synthetic peptide
QQSYTVPYT

SEQ ID NO: 167 - protein, 5 aa, Artificial Sequence
  Description of Artificial Sequence: Synthetic peptide
AYSMI

SEQ ID NO: 168 - protein, 17 aa, Artificial Sequence
  Description of Artificial Sequence: Synthetic peptide
YIRPSGGRTTYADSVKG

SEQ ID NO: 169 - protein, 17 aa, Artificial Sequence
  Description of Artificial Sequence: Synthetic peptide
GGLLLWSRELKSNYFDY

SEQ ID NO: 170 - protein, 11 aa, Artificial Sequence
  Description of Artificial Sequence: Synthetic peptide
RASQPIDNYLN

SEQ ID NO: 171 - protein, 7 aa, Artificial Sequence
  Description of Artificial Sequence: Synthetic peptide
AASRLQS

SEQ ID NO: 172 - protein, 9 aa, Artificial Sequence
  Description of Artificial Sequence: Synthetic peptide
QQSYTVPYT

SEQ ID NO: 173 - protein, 5 aa, Artificial Sequence
  Description of Artificial Sequence: Synthetic peptide
AYSMI

SEQ ID NO: 174 - protein, 17 aa, Artificial Sequence
  Description of Artificial Sequence: Synthetic peptide
YIRPSGGRTTYADSVKG

SEQ ID NO: 175 - protein, 17 aa, Artificial Sequence
  Description of Artificial Sequence: Synthetic peptide
GGLLLWFMELKSNYFDY

SEQ ID NO: 176 - protein, 11 aa, Artificial Sequence
  Description of Artificial Sequence: Synthetic peptide
RASQPIDNYLN

SEQ ID NO: 177 - protein, 7 aa, Artificial Sequence
  Description of Artificial Sequence: Synthetic peptide
AASRLQS

SEQ ID NO: 178 - protein, 9 aa, Artificial Sequence
  Description of Artificial Sequence: Synthetic peptide
QQSYTVPYT

SEQ ID NO: 179 - protein, 5 aa, Artificial Sequence
  Description of Artificial Sequence: Synthetic peptide
AYSMI

SEQ ID NO: 180 - protein, 17 aa, Artificial Sequence
  Description of Artificial Sequence: Synthetic peptide
YIRPSGGRTTYADSVKG

SEQ ID NO: 181 - protein, 17 aa, Artificial Sequence
  Description of Artificial Sequence: Synthetic peptide
GGLLLWGRELKSNYFDY

SEQ ID NO: 182 - protein, 11 aa, Artificial Sequence
  Description of Artificial Sequence: Synthetic peptide
RASQPIDNYLN

SEQ ID NO: 183 - protein, 7 aa, Artificial Sequence
  Description of Artificial Sequence: Synthetic peptide
AASRLQS

SEQ ID NO: 184 - protein, 9 aa, Artificial Sequence
  Description of Artificial Sequence: Synthetic peptide
QQSYTVPYT

SEQ ID NO: 185 - protein, 5 aa, Artificial Sequence
  Description of Artificial Sequence: Synthetic peptide
AYSMI

SEQ ID NO: 186 - protein, 17 aa, Artificial Sequence
  Description of Artificial Sequence: Synthetic peptide
YIRPSGGRTTYADSVKG

SEQ ID NO: 187 - protein, 17 aa, Artificial Sequence
  Description of Artificial Sequence: Synthetic peptide
GGLLLWNRELKSNYFDY

SEQ ID NO: 188 - protein, 11 aa, Artificial Sequence
  Description of Artificial Sequence: Synthetic peptide
RASQPIDNYLN

SEQ ID NO: 189 - protein, 7 aa, Artificial Sequence
  Description of Artificial Sequence: Synthetic peptide
AASRLQS

SEQ ID NO: 190 - protein, 9 aa, Artificial Sequence
  Description of Artificial Sequence: Synthetic peptide
QQSYTVPYT

SEQ ID NO: 191 - protein, 5 aa, Artificial Sequence
  Description of Artificial Sequence: Synthetic peptide
AYSMI

SEQ ID NO: 192 - protein, 17 aa, Artificial Sequence
  Description of Artificial Sequence: Synthetic peptide
YIRPSGGRTTYADSVKG

SEQ ID NO: 193 - protein, 17 aa, Artificial Sequence
  Description of Artificial Sequence: Synthetic peptide
GGLLLWDRELKSNYFDY

SEQ ID NO: 194 - protein, 11 aa, Artificial Sequence
  Description of Artificial Sequence: Synthetic peptide
RASQPIDNYLN

SEQ ID NO: 195 - protein, 7 aa, Artificial Sequence
  Description of Artificial Sequence: Synthetic peptide
AASRLQS

SEQ ID NO: 196 - protein, 9 aa, Artificial Sequence
  Description of Artificial Sequence: Synthetic peptide
QQSYTVPYT

SEQ ID NO: 197 - protein, 5 aa, Artificial Sequence
  Description of Artificial Sequence: Synthetic peptide
AYSMI

SEQ ID NO: 198 - protein, 17 aa, Artificial Sequence
  Description of Artificial Sequence: Synthetic peptide
YIRPSGGRTTYADSVKG

SEQ ID NO: 199 - protein, 17 aa, Artificial Sequence
  Description of Artificial Sequence: Synthetic peptide
GGLLLWQRELKSNYFDY

SEQ ID NO: 200 - protein, 11 aa, Artificial Sequence
  Description of Artificial Sequence: Synthetic peptide
RASQPIDNYLN

SEQ ID NO: 201 - protein, 7 aa, Artificial Sequence
  Description of Artificial Sequence: Synthetic peptide
AASRLQS

SEQ ID NO: 202 - protein, 9 aa, Artificial Sequence
  Description of Artificial Sequence: Synthetic peptide
QQSYTVPYT

SEQ ID NO: 203 - protein, 5 aa, Artificial Sequence
  Description of Artificial Sequence: Synthetic peptide
AYSMI

SEQ ID NO: 204 - protein, 17 aa, Artificial Sequence
  Description of Artificial Sequence: Synthetic peptide
YIRPSGGRTTYADSVKG

SEQ ID NO: 205 - protein, 17 aa, Artificial Sequence
  Description of Artificial Sequence: Synthetic peptide
GGLLLWTRELKSNYFDY

SEQ ID NO: 206 - protein, 11 aa, Artificial Sequence
  Description of Artificial Sequence: Synthetic peptide
RASQPIDNYLN

SEQ ID NO: 207 - protein, 7 aa, Artificial Sequence
  Description of Artificial Sequence: Synthetic peptide
AASRLQS

SEQ ID NO: 208 - protein, 9 aa, Artificial Sequence
  Description of Artificial Sequence: Synthetic peptide
QQSYTVPYT

SEQ ID NO: 209 - protein, 5 aa, Artificial Sequence
  Description of Artificial Sequence: Synthetic peptide
AYSMI

SEQ ID NO: 210 - protein, 17 aa, Artificial Sequence
  Description of Artificial Sequence: Synthetic peptide
YIRPSGGRTTYADSVKG

SEQ ID NO: 211 - protein, 17 aa, Artificial Sequence
  Description of Artificial Sequence: Synthetic peptide
GGLLLWARELKSNYFDY

SEQ ID NO: 212 - protein, 11 aa, Artificial Sequence
  Description of Artificial Sequence: Synthetic peptide
RASQPIDNYLN

SEQ ID NO: 213 - protein, 7 aa, Artificial Sequence
  Description of Artificial Sequence: Synthetic peptide
AASRLQS

SEQ ID NO: 214 - protein, 9 aa, Artificial Sequence
  Description of Artificial Sequence: Synthetic peptide
QQSYTVPYT

SEQ ID NO: 215 - protein, 5 aa, Artificial Sequence
  Description of Artificial Sequence: Synthetic peptide
AYSMI

SEQ ID NO: 216 - protein, 17 aa, Artificial Sequence
  Description of Artificial Sequence: Synthetic peptide
YIRPSGGRTTYADSVKG

SEQ ID NO: 217 - protein, 17 aa, Artificial Sequence
  Description of Artificial Sequence: Synthetic peptide
GGLLLWERELKSNYFDY

SEQ ID NO: 218 - protein, 12 aa, Artificial Sequence
  Description of Artificial Sequence: Synthetic peptide
RTSQFVNSNYLA

SEQ ID NO: 219 - protein, 7 aa, Artificial Sequence
  Description of Artificial Sequence: Synthetic peptide
GASSRAT

SEQ ID NO: 220 - protein, 9 aa, Artificial Sequence
  Description of Artificial Sequence: Synthetic peptide
QQSSRTPWT

SEQ ID NO: 221 - protein, 5 aa, Artificial Sequence
  Description of Artificial Sequence: Synthetic peptide
HYLMT

SEQ ID NO: 222 - protein, 17 aa, Artificial Sequence
  Description of Artificial Sequence: Synthetic peptide
YISPSGGHTIYADSVKG

SEQ ID NO: 223 - protein, 16 aa, Artificial Sequence
  Description of Artificial Sequence: Synthetic peptide
VARGIAARSRTSYFDY

SEQ ID NO: 224 - protein, 108 aa, Artificial Sequence
  Description of Artificial Sequence: Synthetic polypeptide
QDIQMTQSPSSLSASVGDRVTITCRASQSIRNYLNWYQQKPGKAPNLLIYAASTLQSGVPARFSGSGSGTDFTLTISSLQPEDFATYYCQQLSGYPHTFGQGTKLEIK

SEQ ID NO: 225 - protein, 142 aa, Artificial Sequence
  Description of Artificial Sequence: Synthetic polypeptide
EVQLLESGGGLVQPGGSLRLSCAASGFTFSFYYMVWVRQAPGKGLEWVSVIYPSGGITVYADSVKGRFTISRDNSKNTLYLQMNSLRAEDTAVYYCARDKWAVMPPYYYYAMDVWGQGTTVTVSSASTKGPSVFPLAPSSKS

SEQ ID NO: 226 - protein, 111 aa, Artificial Sequence
  Description of Artificial Sequence: Synthetic polypeptide
QSALTQPASVSGSPGQSITISCTGTNSDVGNYNLVSWYQQHPGEAPKLLIYEVNKRPSGVSNRFSGSKSGNTASLTISGLQAEDEADYLCCSYAGNRNFYVFGAGTKVTVL

SEQ ID NO: 227 - protein, 140 aa, Artificial Sequence
  Description of Artificial Sequence: Synthetic polypeptide
EVQLLESGGGLVQPGGSLRLSCAASGFTFSWYSMVWVRQAPGKGLEWVSSISPSGGLTNYADSVKGRFTISRDNSKNTLYLQMNSLRAEDTAVYYCARHTAARPFYYYYMDVWGKGTTVTVSSASTKGPSVFPLAPSSKS

SEQ ID NO: 228 - protein, 106 aa, Artificial Sequence
  Description of Artificial Sequence: Synthetic polypeptide
QSELTQPPSVSVSPGQTASITCSGDKLGDKYACWYQQKPGQSPVLVIYQDSKRPSGIPERFSGSNSGNTATLTISGTQAMDEADYYCQAWDSSTGVFGGGTKLTVL

SEQ ID NO: 229 - protein, 139 aa, Artificial Sequence
  Description of Artificial Sequence: Synthetic polypeptide
EVQLLESGGGLVQPGGSLRLSCAASGFTFSWYLMIWVRQAPGKGLEWVSYIYPSGGFTYYADSVKGRFTISRDNSKNTLYLQMNSLRAEDMAVYYCARTEGPLSWGYGMDVWGQGTTVTVSSASTKGPSVFPLAPSSKS

SEQ ID NO: 230 - protein, 106 aa, Artificial Sequence
  Description of Artificial Sequence: Synthetic polypeptide
QCELTQPPSESVSPGQTANITCSGDKLGNKYAYWYQQKPGQSPVLVIYQDNNRPSGIPERFSGSNSGNTATLTISGTQAIDEANYYCQAWDSRTVVFGGGTKLTVL

SEQ ID NO: 231 - protein, 141 aa, Artificial Sequence
  Description of Artificial Sequence: Synthetic polypeptide
EVQLLESGGGLVQPGGSLRLSCAASGFTFSTYFMLWVRQAPGKGLEWVSSIYPSGGNTVYADSVKGRFTISRDNSKNTLYLQMNSLRAEDTAVYYCARAASPVRNYYYYGMDVWGQGTTVTVSSASTKGPSVFPLAPSSKS

SEQ ID NO: 232 - protein, 107 aa, Artificial Sequence
  Description of Artificial Sequence: Synthetic polypeptide
QDIQMTQSPSSLSASVGDRVTITCRASQSISVYLNWYQHKPGKAPKLLIYGASNLQFGVPSRFSGSGYGTDFTLTISSLQPEDFATYHCQQTFSLFTFGGGTKVEIK

SEQ ID NO: 233 - protein, 141 aa, Artificial Sequence
  Description of Artificial Sequence: Synthetic polypeptide
EVQLLESGGGLVQPGGSLRLSCAASGFTFSFYNMNWVRQAPGKGLEWVSSISPSGGETNYADSVKGRFTISRDNSKNTLYLQMNSLRAEDTAVYYCARGGGAYRNNWWGGFDIWGLGTMVTVSSASTKGPSVFPLAPSSKS

SEQ ID NO: 234 - protein, 109 aa, Artificial Sequence
  Description of Artificial Sequence: Synthetic polypeptide
QDIQMTQSPGTLSLSPGERATLSCRASQSVSSSYLAWYQQKPGQAPRLLIYGASSRATGIPDRFSGSGSGTDFTLTISRLEPEDFAVYYCQQYGSSPFTFGPGTKVDIK

SEQ ID NO: 235 - protein, 138 aa, Artificial Sequence
  Description of Artificial Sequence: Synthetic polypeptide
EVQLLESGGGLVQPGGSLRLSCAASGFTFSPYNMYWVRQAPGKGLEWVSSIRPSGGGTVYADSVKGRFTISRDNSKNTLYLQMNSLRAEDTAVYYCAGGFIAARWYYFDYWGQGTLVTVSSASTKGPSVFPLAPSSKS

SEQ ID NO: 236 - protein, 106 aa, Artificial Sequence
  Description of Artificial Sequence: Synthetic polypeptide
QSVLTQPPSVSVSPGQTATITCSGDQLGDKYVGWYQQKPGQSPILVIYQDTKRPSGIPERFSGSNSGNTATLTISGTHTVDEAHYYCQAWDTSTAGFGGGTKLTVL

SEQ ID NO: 237 - protein, 139 aa, Artificial Sequence
  Description of Artificial Sequence: Synthetic polypeptide
EVQLLESGGGLVQPGGSLRLSCAASGFTFSWYTMVWVRQAPGKGLEWVSRIYPSGGWTKYADSVKGRFTISRDNSKNTLYLQMNSLRAEDTATYYCAREGLLWFGENAFDIWGQGTMVTVSSASTKGPSVFPLAPSSKS

SEQ ID NO: 238 - protein, 106 aa, Artificial Sequence; identical to SEQ ID NO: 228
  Description of Artificial Sequence: Synthetic polypeptide

SEQ ID NO: 239 - protein, 139 aa, Artificial Sequence; identical to SEQ ID NO: 229
  Description of Artificial Sequence: Synthetic polypeptide

SEQ ID NO: 240 - protein, 106 aa, Artificial Sequence; identical to SEQ ID NO: 236
  Description of Artificial Sequence: Synthetic polypeptide

SEQ ID NO: 241 - protein, 139 aa, Artificial Sequence; identical to SEQ ID NO: 237
  Description of Artificial Sequence: Synthetic polypeptide

SEQ ID NO: 242 - protein, 106 aa, Artificial Sequence
  Description of Artificial Sequence: Synthetic polypeptide
QSALTQPPTVSVSPGQTARITCSGNKLGDKYVAWYQQKPGQSPMLVIYQDTKRPSRVSERFSGSNSANTATLSISGTQALDEADYYCQAWDSSIVIFGGGTRLTVL

SEQ ID NO: 243 - protein, 139 aa, Artificial Sequence
  Description of Artificial Sequence: Synthetic polypeptide
EVQLLESGGGLVQPGGSLRLSCAASGFTFSWYTMVWVRQAPGKGLEWVSYIYPSGGATFYADSVKGRFTISRDNSKNTLYLQMNSLRAEDTAVYYCAMGSYDYIWGFYSDHWGQGTLVTVSSASTKGPSVFPLAPSSKS

SEQ ID NO: 244 - protein, 105 aa, Artificial Sequence
  Description of Artificial Sequence: Synthetic polypeptide
QYELTQPPSVSVSPGQTATITCSGDNLGNKYNSWYQQKPGQSPLLVIYQDTKRPSAIPERFSGSNSGNTATLTISGTQAMDEADYYCQAWDGNVVFGGGTKLTVL

SEQ ID NO: 245 - protein, 144 aa, Artificial Sequence
  Description of Artificial Sequence: Synthetic polypeptide
EVQLLESGGGLVQPGGSLRLSCAASGFTFSWYEMGWVRQAPGKGLEWVSSIYSSGGGTMYADSVKGRFTISRDNSKNTLYLQMNSLRAEDTAVYYCARNPQYSGYDRSLSDGAFDIWGQGTMVTVSSASTKGPSVFPLAPSSKS

SEQ ID NO: 246 - protein, 110 aa, Artificial Sequence
  Description of Artificial Sequence: Synthetic polypeptide
QDIQMTQSPATLSLSPGERATLSCRASQSVSSYLAWYQQKPGQAPRLLIYDASNRATGIPARFSGSGSGTDFTLTISSLEPEDFAVYYCQQRSNWPRGFTFGPGTKVDIK

SEQ ID NO: 247 - protein, 145 aa, Artificial Sequence
  Description of Artificial Sequence: Synthetic polypeptide
EVQLLESGGGLVQPGGSLRLSCAASGFTFSYYHMSWVRQAPGKGLEWVSVISPSGGSTKYADSVKGRFTISRDNSKNTLYLQMNSLRAEDTAVYYCARGGSSDYAWGSYRRPYYFDYWGQGTLVTVSSASTKGPSVFPLAPSSKS

SEQ ID NO: 248 - protein, 106 aa, Artificial Sequence
  Description of Artificial Sequence: Synthetic polypeptide
QSVLTQPPSVSVSPGQTASITCSGEKLGDKYVSWYQQKPGQSPSLVICEDSRRPSGIPERFSGSNSGNTATLTISGAQPMDEADYYCQAWDSSTAIFGPGTKVTVL

SEQ ID NO: 249 - protein, 141 aa, Artificial Sequence
  Description of Artificial Sequence: Synthetic polypeptide
EVQLLESGGGLVQPGGSLRLSCAASGFTFSYYMMVWVRQAPGKGLEWVSYIYSSGGHTVYADSVKGRFTISRDNSKNTLYLQMNSLRAEDTAVYYCARDLFLYDFWSKGAFDIWGQGTMVTVSSASTKGPSVFPLAPSSKS

SEQ ID NO: 250 - protein, 107 aa, Artificial Sequence
  Description of Artificial Sequence: Synthetic polypeptide
QSVLTQPPSVSVSPGQTASITCSGDKLGDKYTSWYQQRPGQSPVLVIYQDIKRPSGIPERFSGSNSGNTATLTISGTQAMDEADYYCQAWDSPNARVFGSGTKVTVL

SEQ ID NO: 251 - protein, 145 aa, Artificial Sequence
  Description of Artificial Sequence: Synthetic polypeptide
EVQLLESGGGLVQPGGSLRLSCAASGFTFSHYRMSWVRQAPGKGLEWVSSIYPSGGRTVYADSVKGRFTISRDNSKNTLYLQMNSLRAEDTAVYYCAKDKFEWRLLFRGIGNDAFDIWGQGTMVTVSSASTKGPSVFPLAPSSKS

SEQ ID NO: 252 - protein, 110 aa, Artificial Sequence
  Description of Artificial Sequence: Synthetic polypeptide
QSELTQPPSASETPGQRVTISCSGSSSNIGSNTVSWFQQLPGSAPRLLIYNDHRRPSGVPDRFSGSKSGTSASLVISGLQSQDEADYYCSAWDDSLNGVVFGGGTKLTVL

SEQ ID NO: 253 - protein, 146 aa, Artificial Sequence
  Description of Artificial Sequence: Synthetic polypeptide
EVQLLESGGGLVQPGGSLRLSCAASGFTFSRYEMYWVRQAPGKGLEWVSSISSSGGPTAYADSVKGRFTISRDNSKNTLYLQMNSLRAEDTAMYYCAKGTPKWELLLRSIYIENAFDIWGQGTMVTVSSASTKGPSVFPLAPSSKS

SEQ ID NO: 254 - protein, 112 aa, Artificial Sequence
  Description of Artificial Sequence: Synthetic polypeptide
QDIVMTQTPPSLPVNPGEPASISCRSSQSLSDDGNTYLDWYLQRPGQSPQLLIHTLSYRASGVPDRFSGSGSGTDFTLKISRVEAEDVGVYYCMQGTHWPPTFGQGTKVEIK

SEQ ID NO: 255 - protein, 138 aa, Artificial Sequence
  Description of Artificial Sequence: Synthetic polypeptide
EVQLLESGGGLVQPGGSLRLSCAASGFTFSFYAMHWVRQAPGKGLEWVSGIVPSGGRTHYADSVKGRFTISRDNSKNTLYLQMNSLRAEDTAVYYCATDSSGSPNPLFDYWGQGTLVTVSSASTKGPSVFPLAPSPKS

SEQ ID NO: 256 - protein, 113 aa, Artificial Sequence
  Description of Artificial Sequence: Synthetic polypeptide
QDIQMTQSPLSLSVTPGEPASISCRSSLSLLHSNGYNYLDWYVQRPGQSPQLLMYLSSTRASGVPDRFSGSGSGTDFTLEISRVEAEDVGVYYCMQPLETPPTFGGGTKVEIK

SEQ ID NO: 257 - protein, 142 aa, Artificial Sequence
  Description of Artificial Sequence: Synthetic polypeptide
EVQLLESGGGLVQPGGSLRLSCAASGFTFSYYEMDWVRQAPGKGLEWVSGISSSGGHTAYADSVKGRFTISRDNSKNTLYLQMNSLRAEDTATYYCARERRSSSRARYYYGMDVWGQGTTVTVSSASTKGPSVFPLAPSSKS

SEQ ID NO: 258 - protein, 109 aa, Artificial Sequence
  Description of Artificial Sequence: Synthetic polypeptide
QSVLIQPPSVSGIPGQRVTISCSGNNSNFGSNTVTWYQQLPGTAPKLLIYSDSRRPSGVPDRFSGSRSDTSASLAISGLQSEDEAEYHCAAWDDSLNGVFGGGTKLTVL

SEQ ID NO: 259 - protein, 147 aa, Artificial Sequence
  Description of Artificial Sequence: Synthetic polypeptide
EVQLLESGGGLVQPGGSLRLSCAASGFTFSDYRMQWVRQAPGKGLEWVSVIVPSGGNTMYADSVKGRFTISRDNSKNTLYLQMNSLRAEDTAVYYCARGGPGSSIAARRAPTGYYGMDVWGQGTTVTVSSASTKGPSVFPLAPSSKS

SEQ ID NO: 260 - protein, 108 aa, Artificial Sequence
  Description of Artificial Sequence: Synthetic polypeptide
QDIQMTQSPSSLSAFVGDRVTITCRASQPIDNYLNWYHQKPGKAPKLLIYAASRLQSGVPSRLSGSGFGTDFTLTISSLQPEDFGNYYCQQSYTVPYTFGGGTKVEIR

SEQ ID NO: 261 - protein, 143 aa, Artificial Sequence
  Description of Artificial Sequence: Synthetic polypeptide
EVQLLESGGGLVQPGGSLRLSCAASGFTFSAYSMIWVRQAPGKGLEWVSYIRPSGGRTTYADSVKGRFTISRDNSKNTLYLQMNSLRAEDTAVYYCARGGLLLWFRELKSNYFDYWGQGTLVTVSSASTKGPSVFPLAPSSKS

SEQ ID NO: 262 - protein, 110 aa, Artificial Sequence; identical to SEQ ID NO: 246
  Description of Artificial Sequence: Synthetic polypeptide

SEQ ID NO: 263 - protein, 145 aa, Artificial Sequence; identical to SEQ ID NO: 247
  Description of Artificial Sequence: Synthetic polypeptide

SEQ ID NO: 264 - protein, 107 aa, Artificial Sequence; identical to SEQ ID NO: 250
  Description of Artificial Sequence: Synthetic polypeptide

SEQ ID NO: 265 - protein, 145 aa, Artificial Sequence; identical to SEQ ID NO: 251
  Description of Artificial Sequence: Synthetic polypeptide

SEQ ID NO: 266 - protein, 108 aa, Artificial Sequence
  Description of Artificial Sequence: Synthetic polypeptide
QDIQMTQSPSSLSASVGDRVTITCRASGDIGNALGWYQQKPGKAPRLLISDASTLQSGVPLRFSGSGSGTEFTLTISSLQPEDFATYYCLQGYNYPRTFGQGTKLEIR

SEQ ID NO: 267 - protein, 141 aa, Artificial Sequence
  Description of Artificial Sequence: Synthetic polypeptide
EVQLLESGGGLVQPGGSLRLSCAASGFTFSRYIMHWVRQAPGKGLEWVSSISPSGGLTSYADSVKGRFTISRDNSKNTLYLQMNSLRAEDTAVYYCAREFENAYHYYYYGMDVWGQGTTVTVSSASTKGPSVFPLAPSSKS

SEQ ID NO: 268 - protein, 108 aa, Artificial Sequence
  Description of Artificial Sequence: Synthetic polypeptide
QDIQMTQSPSSLSASVGDRVTITCRASQSISSYLSWYQQRPGKAPNLLIYAASSLQSGVPSRFSGSGSGTDFTLTISSLQPEDFATYYCQQSISIPRTFGQGTKVEVK

SEQ ID NO: 269 - protein, 146 aa, Artificial Sequence
  Description of Artificial Sequence: Synthetic polypeptide
EVQLLESGGGLVQPGGSLRLSCAASGFTFSPYFMGWVRQAPGKGLEWVSGIGPSGGSTTYADSVKGRFTISRDNSKNTLYLQMNSLRAEDTAVYYCAREGPPYSSGWYRGLRQYHFDYWGQGTLVTVSSASTKGPSVFPLAPSSKS

SEQ ID NO: 270 - protein, 108 aa, Artificial Sequence
  Description of Artificial Sequence: Synthetic polypeptide
QDIQMTQSPSFLSASVGDRVTITCRASQGISSYLAWYQQKPGKAPKLLIYAASTLQSGVPSRFSGSGSGTEFTLTISSLQPEDFATYYCQQLNSYPLTFGGGTKVEIK

SEQ ID NO: 271 - protein, 142 aa, Artificial Sequence
  Description of Artificial Sequence: Synthetic polypeptide
EVQLLESGGGLVQPGGSLRLSCAASGFTFSHYLMTWVRQAPGKGLEWVSYISPSGGHTIYADSVKGRFTISRDNSKNTLYLQMNSLRAEDTAVYYCARVARGIAARSRTSYFDYWGQGTLVTVSSASTKGPSVFPLAPSSKS

SEQ ID NO: 272 - protein, 106 aa, Artificial Sequence
  Description of Artificial Sequence: Synthetic polypeptide
QSALTQPPSVSVSPGQTASITCSGDKLGDKYVSWYQQRPGQSPVLVIYQDTKRPSGIPERFSGSNSGNTATLTISGTQAVDEADYYCQAWDSSTYVFGGGTKVTVL

SEQ ID NO: 273 - protein, 147 aa, Artificial Sequence
  Description of Artificial Sequence: Synthetic polypeptide
EVQLLESGGGLVQPGGSLRLSCAASGFTFSDYAMKWVRQAPGKGLEWVSSISSSGGVTQYADSVKGRFTISRDNSKNTLYLQMNSLRAEDTAVYYCAREEDYSSSWYSRRFDYYYGMDVWGQGTTVTVSSASTKGPSVFPLAPSSKS

SEQ ID NO: 274 - protein, 107 aa, Artificial Sequence
  Description of Artificial Sequence: Synthetic polypeptide
QDIQMTQSPSTLSASVGDRVTITCRASQSISSWLAWYQQKPGKAPNLLIYKASTLESGVPSRFSGSGSGTEFTLTISSLQPDDFATYYCQQYNTYWTFGQGTKVEIK

SEQ ID NO: 275 - protein, 139 aa, Artificial Sequence
  Description of Artificial Sequence: Synthetic polypeptide
EVQLLESGGGLVQPGGSLRLSCAASGFTFSHYIMMWVRQAPGKGLEWVSGIYSSGGITVYADSVKGRFTISRDNSKNTLYLQMNSLRAEDTAVYYCAYRRTGIPRRDAFDIWGQGTMVTVSSASTKGPSVFPLAPSSKS

SEQ ID NO: 276 - protein, 108 aa, Artificial Sequence; identical to SEQ ID NO: 260
  Description of Artificial Sequence: Synthetic polypeptide

SEQ ID NO: 277 - protein, 143 aa, Artificial Sequence
  Description of Artificial Sequence: Synthetic polypeptide
EVQLLESGGGLVQPGGSLRLSCAASGFTFSAYSMIWVRQAPGKGLEWVSYIRPSGGRTTYADSVKGRFTISRDNSKNTLYLQMNSLRAEDTAVYYCARGGLLLWSRELKSNYFDYWGQGTLVTVSSASTKGPSVFPLAPSSKS

SEQ ID NO: 278 - protein, 108 aa, Artificial Sequence; identical to SEQ ID NO: 260
  Description of Artificial Sequence: Synthetic polypeptide

SEQ ID NO: 279 - protein, 143 aa, Artificial Sequence
  Description of Artificial Sequence: Synthetic polypeptide
EVQLLESGGGLVQPGGSLRLSCAASGFTFSAYSMIWVRQAPGKGLEWVSYIRPSGGRTTYADSVKGRFTISRDNSKNTLYLQMNSLRAEDTAVYYCARGGLLLWMRELKSNYFDYWGQGTLVTVSSASTKGPSVFPLAPSSKS

SEQ ID NO: 280 - protein, 108 aa, Artificial Sequence; identical to SEQ ID NO: 260
  Description of Artificial Sequence: Synthetic polypeptide

SEQ ID NO: 281 - protein, 143 aa, Artificial Sequence
  Description of Artificial Sequence: Synthetic polypeptide
EVQLLESGGGLVQPGGSLRLSCAASGFTFSAYSMIWVRQAPGKGLEWVSYIRPSGGRTTYADSVKGRFTISRDNSKNTLYLQMNSLRAEDTAVYYCARGGLLLWGRELKSNYFDYWGQGTLVTVSSASTKGPSVFPLAPSSKS

SEQ ID NO: 282 - protein, 108 aa, Artificial Sequence; identical to SEQ ID NO: 260
  Description of Artificial Sequence: Synthetic polypeptide

SEQ ID NO: 283 - protein, 143 aa, Artificial Sequence
  Description of Artificial Sequence: Synthetic polypeptide
EVQLLESGGGLVQPGGSLRLSCAASGFTFSAYSMIWVRQAPGKGLEWVSYIRPSGGRTTYADSVKGRFTISRDNSKNTLYLQMNSLRAEDTAVYYCARGGLLLWNRELKSNYFDYWGQGTLVTVSSASTKGPSVFPLAPSSKS

SEQ ID NO: 284 - protein, 108 aa, Artificial Sequence; identical to SEQ ID NO: 260
  Description of Artificial Sequence: Synthetic polypeptide

SEQ ID NO: 285 - protein, 143 aa, Artificial Sequence
  Description of Artificial Sequence: Synthetic polypeptide
EVQLLESGGGLVQPGGSLRLSCAASGFTFSAYSMIWVRQAPGKGLEWVSYIRPSGGRTTYADSVKGRFTISRDNSKNTLYLQMNSLRAEDTAVYYCARGGLLLWDRELKSNYFDYWGQGTLVTVSSASTKGPSVFPLAPSSKS

SEQ ID NO: 286 - protein, 108 aa, Artificial Sequence; identical to SEQ ID NO: 260
  Description of Artificial Sequence: Synthetic polypeptide

SEQ ID NO: 287 - protein, 143 aa, Artificial Sequence
  Description of Artificial Sequence: Synthetic polypeptide
EVQLLESGGGLVQPGGSLRLSCAASGFTFSAYSMIWVRQAPGKGLEWVSYIRPSGGRTTYADSVKGRFTISRDNSKNTLYLQMNSLRAEDTAVYYCARGGLLLWQRELKSNYFDYWGQGTLVTVSSASTKGPSVFPLAPSSKS

SEQ ID NO: 288 - protein, 108 aa, Artificial Sequence; identical to SEQ ID NO: 260
  Description of Artificial Sequence: Synthetic polypeptide

SEQ ID NO: 289 - protein, 143 aa, Artificial Sequence
  Description of Artificial Sequence: Synthetic polypeptide
EVQLLESGGGLVQPGGSLRLSCAASGFTFSAYSMIWVRQAPGKGLEWVSYIRPSGGRTTYADSVKGRFTISRDNSKNTLYLQMNSLRAEDTAVYYCARGGLLLWTRELKSNYFDYWGQGTLVTVSSASTKGPSVFPLAPSSKS

SEQ ID NO: 290 - protein, 108 aa, Artificial Sequence; identical to SEQ ID NO: 260
  Description of Artificial Sequence: Synthetic polypeptide

SEQ ID NO: 291 - protein, 143 aa, Artificial Sequence
  Description of Artificial Sequence: Synthetic polypeptide
EVQLLESGGGLVQPGGSLRLSCAASGFTFSAYSMIWVRQAPGKGLEWVSYIRPSGGRTTYADSVKGRFTISRDNSKNTLYLQMNSLRAEDTAVYYCARGGLLLWARELKSNYFDYWGQGTLVTVSSASTKGPSVFPLAPSSKS

SEQ ID NO: 292 - protein, 108 aa, Artificial Sequence; identical to SEQ ID NO: 260
  Description of Artificial Sequence: Synthetic polypeptide

SEQ ID NO: 293 - protein, 143 aa, Artificial Sequence
  Description of Artificial Sequence: Synthetic polypeptide
EVQLLESGGGLVQPGGSLRLSCAASGFTFSAYSMIWVRQAPGKGLEWVSYIRPSGGRTTYADSVKGRFTISRDNSKNTLYLQMNSLRAEDTAVYYCARGGLLLWERELKSNYFDYWGQGTLVTVSSASTKGPSVFPLAPSSKS

SEQ ID NO: 294 - protein, 11 aa, Artificial Sequence
  Description of Artificial Sequence: Synthetic peptide
RASQSISMYLN

SEQ ID NO: 295 - protein, 7 aa, Artificial Sequence
  Description of Artificial Sequence: Synthetic peptide
GTSSLQS

SEQ ID NO: 296 - protein, 9 aa, Artificial Sequence
  Description of Artificial Sequence: Synthetic peptide
QQSYSAPWT

SEQ ID NO: 297 - protein, 5 aa, Artificial Sequence
  Description of Artificial Sequence: Synthetic peptide
LYQMT

SEQ ID NO: 298 - protein, 17 aa, Artificial Sequence
  Description of Artificial Sequence: Synthetic peptide
GIWPSGGFTDYADSVKG

SEQ ID NO: 299 - protein, 10 aa, Artificial Sequence
  Description of Artificial Sequence: Synthetic peptide
VSTAVADNDY

SEQ ID NO: 300 - protein, 11 aa, Artificial Sequence
  Description of Artificial Sequence: Synthetic peptide
RASQRISFYLN

SEQ ID NO: 301 - protein, 7 aa, Artificial Sequence
  Description of Artificial Sequence: Synthetic peptide
GASSLQS

SEQ ID NO: 302 - protein, 9 aa, Artificial Sequence
  Description of Artificial Sequence: Synthetic peptide
QQTFSTPNT

SEQ ID NO: 303 - protein, 5 aa, Artificial Sequence
  Description of Artificial Sequence: Synthetic peptide
PYPMQ

SEQ ID NO: 304 - protein, 17 aa, Artificial Sequence
  Description of Artificial Sequence: Synthetic peptide
SISSSGGMTEYADSVKG

SEQ ID NO: 305 - protein, 12 aa, Artificial Sequence
  Description of Artificial Sequence: Synthetic peptide
DDYGGKGGAFDI

SEQ ID NO: 306 - protein, 11 aa, Artificial Sequence
  Description of Artificial Sequence: Synthetic peptide
RASQSISSYLN

SEQ ID NO: 307 - protein, 7 aa, Artificial Sequence
  Description of Artificial Sequence: Synthetic peptide
AASSLQS

SEQ ID NO: 308 - protein, 9 aa, Artificial Sequence
  Description of Artificial Sequence: Synthetic peptide
QQSYSTLWT

SEQ ID NO: 309 - protein, 5 aa, Artificial Sequence
  Description of Artificial Sequence: Synthetic peptide
KYFMG

SEQ ID NO: 310 - protein, 17 aa, Artificial Sequence
  Description of Artificial Sequence: Synthetic peptide
VIGSSGGWTSYADSVKG

SEQ ID NO: 311 - protein, 10 aa, Artificial Sequence
  Description of Artificial Sequence: Synthetic peptide
VSTAVADNDY

SEQ ID NO: 312 - protein, 11 aa, Artificial Sequence
  Description of Artificial Sequence: Synthetic peptide
RASQSISSYLN

SEQ ID NO: 313 - protein, 7 aa, Artificial Sequence
  Description of Artificial Sequence: Synthetic peptide
GASSLQS

SEQ ID NO: 314 - protein, 8 aa, Artificial Sequence
  Description of Artificial Sequence: Synthetic peptide
QQSYTRWT

SEQ ID NO: 315 - protein, 5 aa, Artificial Sequence
  Description of Artificial Sequence: Synthetic peptide
RYHMV

SEQ ID NO: 316 - protein, 17 aa, Artificial Sequence
  Description of Artificial Sequence: Synthetic peptide
SISPSGGWTNYADSVKG

SEQ ID NO: 317 - protein, 11 aa, Artificial Sequence
  Description of Artificial Sequence: Synthetic peptide
EMATIAGQFDP

SEQ ID NO: 318 - protein, 11 aa, Artificial Sequence
  Description of Artificial Sequence: Synthetic peptide
RASQSISTYLN

SEQ ID NO: 319 - protein, 7 aa, Artificial Sequence
  Description of Artificial Sequence: Synthetic peptide
NAFSMER

SEQ ID NO: 320 - protein, 9 aa, Artificial Sequence
  Description of Artificial Sequence: Synthetic peptide
QQSYTTPTT

SEQ ID NO: 321 - protein, 5 aa, Artificial Sequence
  Description of Artificial Sequence: Synthetic peptide
RYRMV

SEQ ID NO: 322 - protein, 17 aa, Artificial Sequence
  Description of Artificial Sequence: Synthetic peptide
SIYPSGGMTAYADSVKG

SEQ ID NO: 323 - protein, 11 aa, Artificial Sequence
  Description of Artificial Sequence: Synthetic peptide
DAVGIGDAFDI

SEQ ID NO: 324 - protein, 11 aa, Artificial Sequence
  Description of Artificial Sequence: Synthetic peptide
SGDKLGDKYTS

SEQ ID NO: 325 - protein, 7 aa, Artificial Sequence
  Description of Artificial Sequence: Synthetic peptide
QDSKRPS

SEQ ID NO: 326 - protein, 8 aa, Artificial Sequence
  Description of Artificial Sequence: Synthetic peptide
QAWDSSTV

SEQ ID NO: 327 - protein, 5 aa, Artificial Sequence
  Description of Artificial Sequence: Synthetic peptide
YYPMQ

SEQ ID NO: 328 - protein, 17 aa, Artificial Sequence
  Description of Artificial Sequence: Synthetic peptide
YIYPSGGLTSYADSVKG

SEQ ID NO: 329 - protein, 12 aa, Artificial Sequence
  Description of Artificial Sequence: Synthetic peptide
LFYGSGSVGFEY

SEQ ID NO: 330 - protein, 11 aa, Artificial Sequence
  Description of Artificial Sequence: Synthetic peptide
RASQDISSWLV

SEQ ID NO: 331 - protein, 7 aa, Artificial Sequence
  Description of Artificial Sequence: Synthetic peptide
DASNLQS

SEQ ID NO: 332 - protein, 9 aa, Artificial Sequence
  Description of Artificial Sequence: Synthetic peptide
QQADGFPLT

SEQ ID NO: 333 - protein, 5 aa, Artificial Sequence
  Description of Artificial Sequence: Synthetic peptide
LYNMN

SEQ ID NO: 334 - protein, 17 aa, Artificial Sequence
  Description of Artificial Sequence: Synthetic peptide
SISPSGGFTDYADSVKG

SEQ ID NO: 335 - protein, 9 aa, Artificial Sequence
  Description of Artificial Sequence: Synthetic peptide
DLDLGILDY

SEQ ID NO: 336 - protein, 11 aa, Artificial Sequence
  Description of Artificial Sequence: Synthetic peptide
RASQSISSYLN

SEQ ID NO: 337 - protein, 7 aa, Artificial Sequence
  Description of Artificial Sequence: Synthetic peptide
AASSLQS

SEQ ID NO: 338 - protein, 10 aa, Artificial Sequence
  Description of Artificial Sequence: Synthetic peptide
QQSYSTLMYT

SEQ ID NO: 339 - protein, 5 aa, Artificial Sequence
  Description of Artificial Sequence: Synthetic peptide
HYFMT

SEQ ID NO: 340 - protein, 17 aa, Artificial Sequence
  Description of Artificial Sequence: Synthetic peptide
SIVPSGGMTQYADSVKG

SEQ ID NO: 341 - protein, 10 aa, Artificial Sequence
  Description of Artificial Sequence: Synthetic peptide
DSYSSSWFDI

SEQ ID NO: 342 - protein, 11 aa, Artificial Sequence
  Description of Artificial Sequence: Synthetic peptide
RASQGVSYYLA

SEQ ID NO: 343 - protein, 7 aa, Artificial Sequence
  Description of Artificial Sequence: Synthetic peptide
GASSLQS

SEQ ID NO: 344 - protein, 9 aa, Artificial Sequence
  Description of Artificial Sequence: Synthetic peptide
QQYNTYPPT

SEQ ID NO: 345 - protein, 5 aa, Artificial Sequence
  Description of Artificial Sequence: Synthetic peptide
LYEML

SEQ ID NO: 346 - protein, 17 aa, Artificial Sequence
  Description of Artificial Sequence: Synthetic peptide
VIYPSGGYTDYADSVKG

SEQ ID NO: 347 - protein, 10 aa, Artificial Sequence
  Description of Artificial Sequence: Synthetic peptide
SFSGFGEIDY

SEQ ID NO: 348 - protein, 11 aa, Artificial Sequence
  Description of Artificial Sequence: Synthetic peptide
RASQYISTYLN

SEQ ID NO: 349 - protein, 7 aa, Artificial Sequence
  Description of Artificial Sequence: Synthetic peptide
GTSSLQS

SEQ ID NO: 350 - protein, 9 aa, Artificial Sequence
  Description of Artificial Sequence: Synthetic peptide
QQSFTTPFT

SEQ ID NO: 351 - protein, 5 aa, Artificial Sequence
  Description of Artificial Sequence: Synthetic peptide
GYWMG

SEQ ID NO: 352 - protein, 17 aa, Artificial Sequence
  Description of Artificial Sequence: Synthetic peptide
SISSSGGWTQYADSVKG

SEQ ID NO: 353 - protein, 12 aa, Artificial Sequence
  Description of Artificial Sequence: Synthetic peptide
DDEIAAGGAFDI

SEQ ID NO: 354 - protein, 11 aa, Artificial Sequence
  Description of Artificial Sequence: Synthetic peptide
RASQNIDIYLN

SEQ ID NO: 355 - protein, 7 aa, Artificial Sequence
  Description of Artificial Sequence: Synthetic peptide
GAYNLQS

SEQ ID NO: 356 - protein, 8 aa, Artificial Sequence
  Description of Artificial Sequence: Synthetic peptide
QQSYGTPV

SEQ ID NO: 357 - protein, 5 aa, Artificial Sequence
  Description of Artificial Sequence: Synthetic peptide
GYFMM

SEQ ID NO: 358 - protein, 17 aa, Artificial Sequence
  Description of Artificial Sequence: Synthetic peptide
SIYSSGGYTDYADSVKG

SEQ ID NO: 359 - protein, 10 aa, Artificial Sequence
  Description of Artificial Sequence: Synthetic peptide
EVAGTYAFDI

SEQ ID NO: 360 - protein, 11 aa, Artificial Sequence
  Description of Artificial Sequence: Synthetic peptide
RASQRISTYLN

SEQ ID NO: 361 - protein, 7 aa, Artificial Sequence
  Description of Artificial Sequence: Synthetic peptide
GASSLQS

SEQ ID NO: 362 - protein, 9 aa, Artificial Sequence
  Description of Artificial Sequence: Synthetic peptide
QQSYNTPRT

SEQ ID NO: 363 - protein, 5 aa, Artificial Sequence
  Description of Artificial Sequence: Synthetic peptide
AYEMW

SEQ ID NO: 364 - protein, 17 aa, Artificial Sequence
  Description of Artificial Sequence: Synthetic peptide
YIGSSGGSTSYADSVKG

SEQ ID NO: 365 - protein, 11 aa, Artificial Sequence
  Description of Artificial Sequence: Synthetic peptide
GNSSSFDAFDI

SEQ ID NO: 366 - protein, 11 aa, Artificial Sequence
  Description of Artificial Sequence: Synthetic peptide
RASQSISIYVN

SEQ ID NO: 367 - protein, 7 aa, Artificial Sequence
  Description of Artificial Sequence: Synthetic peptide
AASSLQR

SEQ ID NO: 368 - protein, 9 aa, Artificial Sequence
  Description of Artificial Sequence: Synthetic peptide
QQSFSTPLT

SEQ ID NO: 369 - protein, 5 aa, Artificial Sequence
  Description of Artificial Sequence: Synthetic peptide
HYGMV

SEQ ID NO: 370 - protein, 17 aa, Artificial Sequence
  Description of Artificial Sequence: Synthetic peptide
YIVPSGGLTYYADSVKG

SEQ ID NO: 371 - protein, 10 aa, Artificial Sequence
  Description of Artificial Sequence: Synthetic peptide
VDYTGDGLGY

SEQ ID NO: 372 - protein, 11 aa, Artificial Sequence
  Description of Artificial Sequence: Synthetic peptide
RASQGISSYLN

SEQ ID NO: 373 - protein, 7 aa, Artificial Sequence
  Description of Artificial Sequence: Synthetic peptide
GASSLQS

SEQ ID NO: 374 - protein, 9 aa, Artificial Sequence
  Description of Artificial Sequence: Synthetic peptide
QESYSTLFT

SEQ ID NO: 375 - protein, 5 aa, Artificial Sequence
  Description of Artificial Sequence: Synthetic peptide
LYPMQ

SEQ ID NO: 376 - protein, 17 aa, Artificial Sequence
  Description of Artificial Sequence: Synthetic peptide
SIGSSGGMTFYADSVKG

SEQ ID NO: 377 - protein, 11 aa, Artificial Sequence
  Description of Artificial Sequence: Synthetic peptide
EVGAAGFAFDI

SEQ ID NO: 378 - protein, 11 aa, Artificial Sequence
  Description of Artificial Sequence: Synthetic peptide
RASRTISFYLN

SEQ ID NO: 379 - protein, 7 aa, Artificial Sequence
  Description of Artificial Sequence: Synthetic peptide
GGSSLHS

SEQ ID NO: 380 - protein, 9 aa, Artificial Sequence
  Description of Artificial Sequence: Synthetic peptide
QQSFSSPWT

SEQ ID NO: 381 - protein, 5 aa, Artificial Sequence
  Description of Artificial Sequence: Synthetic peptide
WYKMM

SEQ ID NO: 382 - protein, 17 aa, Artificial Sequence
  Description of Artificial Sequence: Synthetic peptide
SIYPSGGWTNYADSVKG

SEQ ID NO: 383 - protein, 11 aa, Artificial Sequence
  Description of Artificial Sequence: Synthetic peptide
GSPWGDDAFDI

SEQ ID NO: 384 - protein, 11 aa, Artificial Sequence
  Description of Artificial Sequence: Synthetic peptide
RASQSISGYLN

SEQ ID NO: 385 - protein, 7 aa, Artificial Sequence
  Description of Artificial Sequence: Synthetic peptide
AASNLQT

SEQ ID NO: 386 - protein, 9 aa, Artificial Sequence
  Description of Artificial Sequence: Synthetic peptide
QQSHTPPKT

SEQ ID NO: 387 - protein, 5 aa, Artificial Sequence
  Description of Artificial Sequence: Synthetic peptide
EYDMM

SEQ ID NO: 388 - protein, 17 aa, Artificial Sequence
  Description of Artificial Sequence: Synthetic peptide
SIGSSGGMTYYADSVKG

SEQ ID NO: 389 - protein, 10 aa, Artificial Sequence
  Description of Artificial Sequence: Synthetic peptide
DQVAAAAIDY

SEQ ID NO: 390 - protein, 11 aa, Artificial Sequence
  Description of Artificial Sequence: Synthetic peptide
RASQSISSYLN

SEQ ID NO: 391 - protein, 7 aa, Artificial Sequence
  Description of Artificial Sequence: Synthetic peptide
AASSLQS

SEQ ID NO: 392 - protein, 10 aa, Artificial Sequence
  Description of Artificial Sequence: Synthetic peptide
QQSYSTPPYT

SEQ ID NO: 393 - protein, 5 aa, Artificial Sequence
  Description of Artificial Sequence: Synthetic peptide
PYAMT

SEQ ID NO: 394 - protein, 17 aa, Artificial Sequence
  Description of Artificial Sequence: Synthetic peptide
VIYPSGGFTDYADSVKG

SEQ ID NO: 395 - protein, 11 aa, Artificial Sequence
  Description of Artificial Sequence: Synthetic peptide
ASGSYLDAFDI

SEQ ID NO: 396 - protein, 11 aa, Artificial Sequence
  Description of Artificial Sequence: Synthetic peptide
RASQSISSYLN

SEQ ID NO: 397 - protein, 7 aa, Artificial Sequence
  Description of Artificial Sequence: Synthetic peptide
AASSLQS

SEQ ID NO: 398 - protein, 9 aa, Artificial Sequence
  Description of Artificial Sequence: Synthetic peptide
QQTYTTPWT

SEQ ID NO: 399 - protein, 5 aa, Artificial Sequence
  Description of Artificial Sequence: Synthetic peptide
SYPMG

SEQ ID NO: 400 - protein, 17 aa, Artificial Sequence
  Description of Artificial Sequence: Synthetic peptide
RISSSGGMTIYADSVKG

SEQ ID NO: 401 - protein, 9 aa, Artificial Sequence
  Description of Artificial Sequence: Synthetic peptide
DDWNVGMDV

SEQ ID NO: 402 - protein, 11 aa, Artificial Sequence
  Description of Artificial Sequence: Synthetic peptide
RASQSINTYLN

SEQ ID NO: 403 - protein, 7 aa, Artificial Sequence
  Description of Artificial Sequence: Synthetic peptide
AASTLES

SEQ ID NO: 404 - protein, 9 aa, Artificial Sequence
  Description of Artificial Sequence: Synthetic peptide
QQSYSTPYT

SEQ ID NO: 405 - protein, 5 aa, Artificial Sequence
  Description of Artificial Sequence: Synthetic peptide
DYDME

SEQ ID NO: 406 - protein, 17 aa, Artificial Sequence
  Description of Artificial Sequence: Synthetic peptide
SISPSGGSTIYADSVKG

SEQ ID NO: 407 - protein, 9 aa, Artificial Sequence
  Description of Artificial Sequence: Synthetic peptide
QGLLTAFDI

SEQ ID NO: 408 - protein, 11 aa, Artificial Sequence
  Description of Artificial Sequence: Synthetic peptide
RASQSISSYLN

SEQ ID NO: 409 - protein, 7 aa, Artificial Sequence
  Description of Artificial Sequence: Synthetic peptide
AASSLQS

SEQ ID NO: 410 - protein, 9 aa, Artificial Sequence
  Description of Artificial Sequence: Synthetic peptide
QQSYSTPIT

SEQ ID NO: 411 - protein, 5 aa, Artificial Sequence
  Description of Artificial Sequence: Synthetic peptide
YYTML

SEQ ID NO: 412 - protein, 17 aa, Artificial Sequence
  Description of Artificial Sequence: Synthetic peptide
SIYPSGGFTMYADSVKG

SEQ ID NO: 413 - protein, 10 aa, Artificial Sequence
  Description of Artificial Sequence: Synthetic peptide
VDTAMAMIDY

SEQ ID NO: 414 - protein, 11 aa, Artificial Sequence
  Description of Artificial Sequence: Synthetic peptide
RASRSIATYLN

SEQ ID NO: 415 - protein, 7 aa, Artificial Sequence
  Description of Artificial Sequence: Synthetic peptide
GASTLQS

SEQ ID NO: 416 - protein, 9 aa, Artificial Sequence
  Description of Artificial Sequence: Synthetic peptide
QQSFSDPYT

SEQ ID NO: 417 - protein, 5 aa, Artificial Sequence
  Description of Artificial Sequence: Synthetic peptide
AYMMI

SEQ ID NO: 418 - protein, 17 aa, Artificial Sequence
  Description of Artificial Sequence: Synthetic peptide
VIYPSGGVTMYADSVKG

SEQ ID NO: 419 - protein, 11 aa, Artificial Sequence
  Description of Artificial Sequence: Synthetic peptide
GTVGASDAFDI

SEQ ID NO: 420 - protein, 11 aa, Artificial Sequence
  Description of Artificial Sequence: Synthetic peptide
SGDKLGNRYTS

SEQ ID NO: 421 - protein, 7 aa, Artificial Sequence
  Description of Artificial Sequence: Synthetic peptide
QDNKRPS

SEQ ID NO: 422 - protein, 9 aa, Artificial Sequence
  Description of Artificial Sequence: Synthetic peptide
QALDSNTYV

SEQ ID NO: 423 - protein, 5 aa, Artificial Sequence
  Description of Artificial Sequence: Synthetic peptide
WYSMG

SEQ ID NO: 424 - protein, 17 aa, Artificial Sequence
  Description of Artificial Sequence: Synthetic peptide
YIVPSGGYTMYADSVKG

SEQ ID NO: 425 - protein, 13 aa, Artificial Sequence
  Description of Artificial Sequence: Synthetic peptide
DPGVSYYYYGMDV

SEQ ID NO: 426 - protein, 11 aa, Artificial Sequence
  Description of Artificial Sequence: Synthetic peptide
RASQSISSYLN

SEQ ID NO: 427 - protein, 7 aa, Artificial Sequence
  Description of Artificial Sequence: Synthetic peptide
AASSLQS

SEQ ID NO: 428 - protein, 9 aa, Artificial Sequence
  Description of Artificial Sequence: Synthetic peptide
QQSYSTPPT

SEQ ID NO: 429 - protein, 5 aa, Artificial Sequence
  Description of Artificial Sequence: Synthetic peptide
AYTMW

SEQ ID NO: 430 - protein, 17 aa, Artificial Sequence
  Description of Artificial Sequence: Synthetic peptide
SIWPSGGSTFYADSVKG

SEQ ID NO: 431 - protein, 11 aa, Artificial Sequence
  Description of Artificial Sequence: Synthetic peptide
TYDSSAGEVDY

SEQ ID NO: 432 - protein, 11 aa, Artificial Sequence
  Description of Artificial Sequence: Synthetic peptide
RASQRISFYLN

SEQ ID NO: 433 - protein, 7 aa, Artificial Sequence
  Description of Artificial Sequence: Synthetic peptide
GASSLQS

SEQ ID NO: 434 - protein, 9 aa, Artificial Sequence
  Description of Artificial Sequence: Synthetic peptide
QQTFSTPNT

SEQ ID NO: 435 - protein, 5 aa, Artificial Sequence
  Description of Artificial Sequence: Synthetic peptide
PYPMQ

SEQ ID NO: 436 - protein, 17 aa, Artificial Sequence
  Description of Artificial Sequence: Synthetic peptide
SISSSGGMTEYADSVKG

SEQ ID NO: 437 - protein, 12 aa, Artificial Sequence
  Description of Artificial Sequence: Synthetic peptide
DDYGGKGGAFDI

SEQ ID NO: 438 - protein, 11 aa, Artificial Sequence
  Description of Artificial Sequence: Synthetic peptide
RASRDISVYLN

SEQ ID NO: 439 - protein, 7 aa, Artificial Sequence
  Description of Artificial Sequence: Synthetic peptide
GASSLQS

SEQ ID NO: 440 - protein, 9 aa, Artificial Sequence
  Description of Artificial Sequence: Synthetic peptide
QQSYSIPFT

SEQ ID NO: 441 - protein, 5 aa, Artificial Sequence
  Description of Artificial Sequence: Synthetic peptide
LYLMH

SEQ ID NO: 442 - protein, 17 aa, Artificial Sequence
  Description of Artificial Sequence: Synthetic peptide
SIYSSGGFTTYADSVKG

SEQ ID NO: 443 - protein, 8 aa, Artificial Sequence
  Description of Artificial Sequence: Synthetic peptide
DTDYGMDV

SEQ ID NO: 444 - protein, 11 aa, Artificial Sequence
  Description of Artificial Sequence: Synthetic peptide
RASQSISTYLN

SEQ ID NO: 445 - protein, 7 aa, Artificial Sequence
  Description of Artificial Sequence: Synthetic peptide
GASSLQS

SEQ ID NO: 446 - protein, 9 aa, Artificial Sequence
  Description of Artificial Sequence: Synthetic peptide
QQSFSTPWT

SEQ ID NO: 447 - protein, 5 aa, Artificial Sequence
  Description of Artificial Sequence: Synthetic peptide
WYEMS

SEQ ID NO: 448 - protein, 17 aa, Artificial Sequence
  Description of Artificial Sequence: Synthetic peptide
RIWPSGGVTMYADSVKG

SEQ ID NO: 449 - protein, 10 aa, Artificial Sequence
  Description of Artificial Sequence: Synthetic peptide
TSITTVGMDV

SEQ ID NO: 450 - protein, 11 aa, Artificial Sequence
  Description of Artificial Sequence: Synthetic peptide
RASQSISIYLN

SEQ ID NO: 451 - protein, 7 aa, Artificial Sequence
  Description of Artificial Sequence: Synthetic peptide
AASTLQS

SEQ ID NO: 452 - protein, 9 aa, Artificial Sequence
  Description of Artificial Sequence: Synthetic peptide
QQSHSIPPT

SEQ ID NO: 453 - protein, 5 aa, Artificial Sequence
  Description of Artificial Sequence: Synthetic peptide
MYPMM

SEQ ID NO: 454 - protein, 17 aa, Artificial Sequence
  Description of Artificial Sequence: Synthetic peptide
YISPSGGMTDYADSVKG

SEQ ID NO: 455 - protein, 10 aa, Artificial Sequence
  Description of Artificial Sequence: Synthetic peptide
VAGSSDAFDI

SEQ ID NO: 456 - protein, 16 aa, Artificial Sequence
  Description of Artificial Sequence: Synthetic peptide
RSSQSLLHSNGYNYLD

SEQ ID NO: 457 - protein, 7 aa, Artificial Sequence
  Description of Artificial Sequence: Synthetic peptide
LGSNRAS

SEQ ID NO: 458 - protein, 9 aa, Artificial Sequence
  Description of Artificial Sequence: Synthetic peptide
MQALQTPLT

SEQ ID NO: 459 - protein, 5 aa, Artificial Sequence
  Description of Artificial Sequence: Synthetic peptide
AYPMN

SEQ ID NO: 460 - protein, 17 aa, Artificial Sequence
  Description of Artificial Sequence: Synthetic peptide
RISSSGGNTSYADSVKG

SEQ ID NO: 461 - protein, 5 aa, Artificial Sequence
  Description of Artificial Sequence: Synthetic peptide
GYLGY

SEQ ID NO: 462 - protein, 11 aa, Artificial Sequence
  Description of Artificial Sequence: Synthetic peptide
RASQSISTYLN

SEQ ID NO: 463 - protein, 7 aa, Artificial Sequence
  Description of Artificial Sequence: Synthetic peptide
GASSLQS

SEQ ID NO: 464 - protein, 9 aa, Artificial Sequence
  Description of Artificial Sequence: Synthetic peptide
QQSYSDPYT

SEQ ID NO: 465 - protein, 5 aa, Artificial Sequence
  Description of Artificial Sequence: Synthetic peptide
LYRMF

SEQ ID NO: 466 - protein, 17 aa, Artificial Sequence
  Description of Artificial Sequence: Synthetic peptide
SIWSSGGPTMYADSVKG

SEQ ID NO: 467 - protein, 10 aa, Artificial Sequence
  Description of Artificial Sequence: Synthetic peptide
EYPSTYYFDY

SEQ ID NO: 468 - protein, 11 aa, Artificial Sequence
  Description of Artificial Sequence: Synthetic peptide
RASQTIDDDLI

SEQ ID NO: 469 - protein, 7 aa, Artificial Sequence
  Description of Artificial Sequence: Synthetic peptide
AASSLQS

SEQ ID NO: 470 - protein, 9 aa, Artificial Sequence
  Description of Artificial Sequence: Synthetic peptide
QQSYNIPRT

SEQ ID NO: 471 - protein, 5 aa, Artificial Sequence
  Description of Artificial Sequence: Synthetic peptide
NYDMM

SEQ ID NO: 472 - protein, 17 aa, Artificial Sequence
  Description of Artificial Sequence: Synthetic peptide
YISPSGGFTRYADSVKG

SEQ ID NO: 473 - protein, 15 aa, Artificial Sequence
  Description of Artificial Sequence: Synthetic peptide
DIYYYNWGPSHYFDS

SEQ ID NO: 474 - protein, 11 aa, Artificial Sequence
  Description of Artificial Sequence: Synthetic peptide
RASQSISGYIN

SEQ ID NO: 475 - protein, 7 aa, Artificial Sequence
  Description of Artificial Sequence: Synthetic peptide
AASSLQS

SEQ ID NO: 476 - protein, 9 aa, Artificial Sequence
  Description of Artificial Sequence: Synthetic peptide
QQYVSYPFT

SEQ ID NO: 477 - protein, 5 aa, Artificial Sequence
  Description of Artificial Sequence: Synthetic peptide
QYGMQ

SEQ ID NO: 478 - protein, 17 aa, Artificial Sequence
  Description of Artificial Sequence: Synthetic peptide
SIRSSGGATRYADSVKG

SEQ ID NO: 479 - protein, 12 aa, Artificial Sequence
  Description of Artificial Sequence: Synthetic peptide
DGYYDSSGYPDY

SEQ ID NO: 480 - protein, 11 aa, Artificial Sequence
  Description of Artificial Sequence: Synthetic peptide
RASQSIDTYLN

SEQ ID NO: 481 - protein, 5 aa, Artificial Sequence
  Description of Artificial Sequence: Synthetic peptide
DASNL

SEQ ID NO: 482 - protein, 9 aa, Artificial Sequence
  Description of Artificial Sequence: Synthetic peptide
QHYLYAPYS

SEQ ID NO: 483 - protein, 5 aa, Artificial Sequence
  Description of Artificial Sequence: Synthetic peptide
NYWMM

SEQ ID NO: 484 - protein, 17 aa, Artificial Sequence
  Description of Artificial Sequence: Synthetic peptide
GIGSSGGFTSYADSVKG

SEQ ID NO: 485 - protein, 11 aa, Artificial Sequence
  Description of Artificial Sequence: Synthetic peptide
GSYSDYGVFES

SEQ ID NO: 486 - protein, 11 aa, Artificial Sequence
  Description of Artificial Sequence: Synthetic peptide
RASQSISSYLN

SEQ ID NO: 487 - protein, 7 aa, Artificial Sequence
  Description of Artificial Sequence: Synthetic peptide
AASSLQS

SEQ ID NO: 488 - protein, 9 aa, Artificial Sequence
  Description of Artificial Sequence: Synthetic peptide
QQSYSTPPT

SEQ ID NO: 489 - protein, 5 aa, Artificial Sequence
  Description of Artificial Sequence: Synthetic peptide
TYEMY

SEQ ID NO: 490 - protein, 17 aa, Artificial Sequence
  Description of Artificial Sequence: Synthetic peptide
GIGSSGGMTMYADSVKG

SEQ ID NO: 491 - protein, 10 aa, Artificial Sequence
  Description of Artificial Sequence: Synthetic peptide
EQPGIAALQF

SEQ ID NO: 492 - protein, 11 aa, Artificial Sequence
  Description of Artificial Sequence: Synthetic peptide
RASQSISIYLT

SEQ ID NO: 493 - protein, 7 aa, Artificial Sequence
  Description of Artificial Sequence: Synthetic peptide
GAATLQT

SEQ ID NO: 494 - protein, 9 aa, Artificial Sequence
  Description of Artificial Sequence: Synthetic peptide
QQTFSLPRT

SEQ ID NO: 495 - protein, 5 aa, Artificial Sequence
  Description of Artificial Sequence: Synthetic peptide
MYHMN

SEQ ID NO: 496 - protein, 17 aa, Artificial Sequence
  Description of Artificial Sequence: Synthetic peptide
GIVSSGGVTFYADSVKG

SEQ ID NO: 497 - protein, 12 aa, Artificial Sequence
  Description of Artificial Sequence: Synthetic peptide
ITTVTTGGAFDI

SEQ ID NO: 498 - protein, 11 aa, Artificial Sequence
  Description of Artificial Sequence: Synthetic peptide
RTSQTINNYLN

SEQ ID NO: 499 - protein, 7 aa, Artificial Sequence
  Description of Artificial Sequence: Synthetic peptide
ATHTLES

SEQ ID NO: 500 - protein, 9 aa, Artificial Sequence
  Description of Artificial Sequence: Synthetic peptide
QQSFAFPYT

SEQ ID NO: 501 - protein, 5 aa, Artificial Sequence
  Description of Artificial Sequence: Synthetic peptide
WYTMG

SEQ ID NO: 502 - protein, 16 aa, Artificial Sequence
  Description of Artificial Sequence: Synthetic peptide
WIYFGGLTTYADSVKG

SEQ ID NO: 503 - protein, 10 aa, Artificial Sequence
  Description of Artificial Sequence: Synthetic peptide
LGGPLDAFDI

SEQ ID NO: 504 - protein, 11 aa, Artificial Sequence
  Description of Artificial Sequence: Synthetic peptide
RASRGIGTYLN

SEQ ID NO: 505 - protein, 7 aa, Artificial Sequence
  Description of Artificial Sequence: Synthetic peptide
AASSLET

SEQ ID NO: 506 - protein, 9 aa, Artificial Sequence
  Description of Artificial Sequence: Synthetic peptide
QESFTNVYN

SEQ ID NO: 507 - protein, 5 aa, Artificial Sequence
  Description of Artificial Sequence: Synthetic peptide
QYAMH

SEQ ID NO: 508 - protein, 17 aa, Artificial Sequence
  Description of Artificial Sequence: Synthetic peptide
SIYPSGGFTLYADSVKG

SEQ ID NO: 509 - protein, 11 aa, Artificial Sequence
  Description of Artificial Sequence: Synthetic peptide
GGWLAGGELLN

SEQ ID NO: 510 - protein, 11 aa, Artificial Sequence
  Description of Artificial Sequence: Synthetic peptide
RTSQGINHYLN

SEQ ID NO: 511 - protein, 7 aa, Artificial Sequence
  Description of Artificial Sequence: Synthetic peptide
AASELQT

SEQ ID NO: 512 - protein, 9 aa, Artificial Sequence
  Description of Artificial Sequence: Synthetic peptide
QQTYTSPYT

SEQ ID NO: 513 - protein, 5 aa, Artificial Sequence
  Description of Artificial Sequence: Synthetic peptide
LYNMT

SEQ ID NO: 514 - protein, 17 aa, Artificial Sequence
  Description of Artificial Sequence: Synthetic peptide
YIYPSGGGTHYADSVKG

SEQ ID NO: 515 - protein, 12 aa, Artificial Sequence
  Description of Artificial Sequence: Synthetic peptide
DTGFWSADAFDI

SEQ ID NO: 516 - protein, 11 aa, Artificial Sequence
  Description of Artificial Sequence: Synthetic peptide
RASQTISVYVN

SEQ ID NO: 517 - protein, 7 aa, Artificial Sequence
  Description of Artificial Sequence: Synthetic peptide
GASSLQS

SEQ ID NO: 518 - protein, 9 aa, Artificial Sequence
  Description of Artificial Sequence: Synthetic peptide
QQSYSIPFT

SEQ ID NO: 519 - protein, 5 aa, Artificial Sequence
  Description of Artificial Sequence: Synthetic peptide
QYPMN

SEQ ID NO: 520 - protein, 17 aa, Artificial Sequence
  Description of Artificial Sequence: Synthetic peptide
SISSSGGFTTYADSVKG

SEQ ID NO: 521 - protein, 9 aa, Artificial Sequence
  Description of Artificial Sequence: Synthetic peptide
EEQQGGFDY

SEQ ID NO: 522 - protein, 11 aa, Artificial Sequence
  Description of Artificial Sequence: Synthetic peptide
RASQSISRYLN

SEQ ID NO: 523 - protein, 7 aa, Artificial Sequence
  Description of Artificial Sequence: Synthetic peptide
AASTLET

SEQ ID NO: 524 - protein, 9 aa, Artificial Sequence
  Description of Artificial Sequence: Synthetic peptide
QQSYSTPYT

SEQ ID NO: 525 - protein, 5 aa, Artificial Sequence
  Description of Artificial Sequence: Synthetic peptide
WYYMG

SEQ ID NO: 526 - protein, 17 aa, Artificial Sequence
  Description of Artificial Sequence: Synthetic peptide
WIVSSGGLTLYADSVKG

SEQ ID NO: 527 - protein, 11 aa, Artificial Sequence
  Description of Artificial Sequence: Synthetic peptide
TTVTTGDAFDI

SEQ ID NO: 528 - protein, 11 aa, Artificial Sequence
  Description of Artificial Sequence: Synthetic peptide
RASQGIRNDLG

SEQ ID NO: 529 - protein, 7 aa, Artificial Sequence
  Description of Artificial Sequence: Synthetic peptide
AASILQS

SEQ ID NO: 530 - protein, 9 aa, Artificial Sequence
  Description of Artificial Sequence: Synthetic peptide
LQDYEYPLT

SEQ ID NO: 531 - protein, 5 aa, Artificial Sequence
  Description of Artificial Sequence: Synthetic peptide
LYSMY

SEQ ID NO: 532 - protein, 17 aa, Artificial Sequence
  Description of Artificial Sequence: Synthetic peptide
RIRPSGGGTVYADSVKG

SEQ ID NO: 533 - protein, 9 aa, Artificial Sequence
  Description of Artificial Sequence: Synthetic peptide
DPLYSSGDV

SEQ ID NO: 534 - protein, 11 aa, Artificial Sequence
  Description of Artificial Sequence: Synthetic peptide
RASQSIGIYLN

SEQ ID NO: 535 - protein, 7 aa, Artificial Sequence
  Description of Artificial Sequence: Synthetic peptide
GASSLQS

SEQ ID NO: 536 - protein, 9 aa, Artificial Sequence
  Description of Artificial Sequence: Synthetic peptide
QHSYSTPFT

SEQ ID NO: 537 - protein, 5 aa, Artificial Sequence
  Description of Artificial Sequence: Synthetic peptide
SYAMV

SEQ ID NO: 538 - protein, 17 aa, Artificial Sequence
  Description of Artificial Sequence: Synthetic peptide
SIGSSGGFTLYADSVKG

SEQ ID NO: 539 - protein, 11 aa, Artificial Sequence
  Description of Artificial Sequence: Synthetic peptide
MNLGGGDAFDI

SEQ ID NO: 540 - protein, 11 aa, Artificial Sequence
  Description of Artificial Sequence: Synthetic peptide
SGDKLGEKYVS

SEQ ID NO: 541 - protein, 7 aa, Artificial Sequence
  Description of Artificial Sequence: Synthetic peptide
QDNKRPS

SEQ ID NO: 542 - protein, 9 aa, Artificial Sequence
  Description of Artificial Sequence: Synthetic peptide
QAWDSYTVV

SEQ ID NO: 543 - protein, 5 aa, Artificial Sequence
  Description of Artificial Sequence: Synthetic peptide
DYEMH

SEQ ID NO: 544 - protein, 17 aa, Artificial Sequence
  Description of Artificial Sequence: Synthetic peptide
GISPSGGKTQYADSVKG

SEQ ID NO: 545 - protein, 16 aa, Artificial Sequence
  Description of Artificial Sequence: Synthetic peptide
DLKWGGRGSPDWYFDL

SEQ ID NO: 546 - protein, 11 aa, Artificial Sequence
  Description of Artificial Sequence: Synthetic peptide
RASQSISSYLN

SEQ ID NO: 547 - protein, 7 aa, Artificial Sequence
  Description of Artificial Sequence: Synthetic peptide
AASSLQS

SEQ ID NO: 548 - protein, 9 aa, Artificial Sequence
  Description of Artificial Sequence: Synthetic peptide
QQSYSTPPT

SEQ ID NO: 549 - protein, 5 aa, Artificial Sequence
  Description of Artificial Sequence: Synthetic peptide
NYPMD

SEQ ID NO: 550 - protein, 17 aa, Artificial Sequence
  Description of Artificial Sequence: Synthetic peptide
SISSSGGWTNYADSVKG

SEQ ID NO: 551 - protein, 11 aa, Artificial Sequence
  Description of Artificial Sequence: Synthetic peptide
DTSGSYLGFDY

SEQ ID NO: 552 - protein, 11 aa, Artificial Sequence
  Description of Artificial Sequence: Synthetic peptide
RASQSISTYLN

SEQ ID NO: 553 - protein, 7 aa, Artificial Sequence
  Description of Artificial Sequence: Synthetic peptide
GAFSLQS

SEQ ID NO: 554 - protein, 9 aa, Artificial Sequence
  Description of Artificial Sequence: Synthetic peptide
QQSHSTPPT

SEQ ID NO: 555 - protein, 5 aa, Artificial Sequence
  Description of Artificial Sequence: Synthetic peptide
QYKML

SEQ ID NO: 556 - protein, 17 aa, Artificial Sequence
  Description of Artificial Sequence: Synthetic peptide
GIGPSGGLTAYADSVKG

SEQ ID NO: 557 - protein, 11 aa, Artificial Sequence
  Description of Artificial Sequence: Synthetic peptide
APWFGELGMDV

SEQ ID NO: 558 - protein, 11 aa, Artificial Sequence
  Description of Artificial Sequence: Synthetic peptide
RASQSISAYLN

SEQ ID NO: 559 - protein, 8 aa, Artificial Sequence
  Description of Artificial Sequence: Synthetic peptide
YGVGSLQS

SEQ ID NO: 560 - protein, 9 aa, Artificial Sequence
  Description of Artificial Sequence: Synthetic peptide
QQGYTTPVT

SEQ ID NO: 561 - protein, 5 aa, Artificial Sequence
  Description of Artificial Sequence: Synthetic peptide
WYRMD

SEQ ID NO: 562 - protein, 17 aa, Artificial Sequence
  Description of Artificial Sequence: Synthetic peptide
SIWPSGGLTSYADSVKG

SEQ ID NO: 563 - protein, 11 aa, Artificial Sequence
  Description of Artificial Sequence: Synthetic peptide
GWAPGGDAFDI

SEQ ID NO: 564 - protein, 11 aa, Artificial Sequence
  Description of Artificial Sequence: Synthetic peptide
RASQSISSYLN

SEQ ID NO: 565 - protein, 7 aa, Artificial Sequence
  Description of Artificial Sequence: Synthetic peptide
AASSLQS

SEQ ID NO: 566 - protein, 9 aa, Artificial Sequence
  Description of Artificial Sequence: Synthetic peptide
QQSYSTPYT

SEQ ID NO: 567 - protein, 5 aa, Artificial Sequence
  Description of Artificial Sequence: Synthetic peptide
DYTMW

SEQ ID NO: 568 - protein, 17 aa, Artificial Sequence
  Description of Artificial Sequence: Synthetic peptide
SISSSGGITFYADSVKG

SEQ ID NO: 569 - protein, 12 aa, Artificial Sequence
  Description of Artificial Sequence: Synthetic peptide
SADTAMGGAFDI

SEQ ID NO: 570 - protein, 11 aa, Artificial Sequence
  Description of Artificial Sequence: Synthetic peptide
SGDKLGDEYAA

SEQ ID NO: 571 - protein, 7 aa, Artificial Sequence
  Description of Artificial Sequence: Synthetic peptide
QDRKRPS

SEQ ID NO: 572 - protein, 9 aa, Artificial Sequence
  Description of Artificial Sequence: Synthetic peptide
QAWGKRNVV

SEQ ID NO: 573 - protein, 5 aa, Artificial Sequence
  Description of Artificial Sequence: Synthetic peptide
WYQMM

SEQ ID NO: 574 - protein, 17 aa, Artificial Sequence
  Description of Artificial Sequence: Synthetic peptide
SISPSGGITEYADSVKG

SEQ ID NO: 575 - protein, 13 aa, Artificial Sequence
  Description of Artificial Sequence: Synthetic peptide
DRSSGWYYYGMDV

SEQ ID NO: 576 - protein, 11 aa, Artificial Sequence
  Description of Artificial Sequence: Synthetic peptide
RASQSISSYLN

SEQ ID NO: 577 - protein, 7 aa, Artificial Sequence
  Description of Artificial Sequence: Synthetic peptide
AASSLQS

SEQ ID NO: 578 - protein, 9 aa, Artificial Sequence
  Description of Artificial Sequence: Synthetic peptide
QQSYSTPRT

SEQ ID NO: 579 - protein, 5 aa, Artificial Sequence
  Description of Artificial Sequence: Synthetic peptide
SYMMH

SEQ ID NO: 580 - protein, 17 aa, Artificial Sequence
  Description of Artificial Sequence: Synthetic peptide
GIYPSGGWTDYADSVKG

SEQ ID NO: 581 - protein, 10 aa, Artificial Sequence
  Description of Artificial Sequence: Synthetic peptide
LVAGLDAFDI

SEQ ID NO: 582 - protein, 11 aa, Artificial Sequence
  Description of Artificial Sequence: Synthetic peptide
RASQSISSYLN

SEQ ID NO: 583 - protein, 7 aa, Artificial Sequence
  Description of Artificial Sequence: Synthetic peptide
AASSLQS

SEQ ID NO: 584 - protein, 9 aa, Artificial Sequence
  Description of Artificial Sequence: Synthetic peptide
QQSYSTPPT

SEQ ID NO: 585 - protein, 5 aa, Artificial Sequence
  Description of Artificial Sequence: Synthetic peptide
WYPMT

SEQ ID NO: 586 - protein, 17 aa, Artificial Sequence
  Description of Artificial Sequence: Synthetic peptide
SIGPSGGQTIYADSVKG

SEQ ID NO: 587 - protein, 11 aa, Artificial Sequence
  Description of Artificial Sequence: Synthetic peptide
EYGDYGGGFDP

SEQ ID NO: 588 - protein, 11 aa, Artificial Sequence
  Description of Artificial Sequence: Synthetic peptide
RASQGISSYLA

SEQ ID NO: 589 - protein, 7 aa, Artificial Sequence
  Description of Artificial Sequence: Synthetic peptide
AASSLQS

SEQ ID NO: 590 - protein, 9 aa, Artificial Sequence
  Description of Artificial Sequence: Synthetic peptide
QQSYNTLRT

SEQ ID NO: 591 - protein, 5 aa, Artificial Sequence
  Description of Artificial Sequence: Synthetic peptide
SYHMM

SEQ ID NO: 592 - protein, 17 aa, Artificial Sequence
  Description of Artificial Sequence: Synthetic peptide
SIYPSGGATMYADSVKG

SEQ ID NO: 593 - protein, 13 aa, Artificial Sequence
  Description of Artificial Sequence: Synthetic peptide
DGYHYGDYTYFQH

SEQ ID NO: 594 - protein, 11 aa, Artificial Sequence
  Description of Artificial Sequence: Synthetic peptide
RASQSISTYLN

SEQ ID NO: 595 - protein, 7 aa, Artificial Sequence
  Description of Artificial Sequence: Synthetic peptide
GASSLQS

SEQ ID NO: 596 - protein, 9 aa, Artificial Sequence
  Description of Artificial Sequence: Synthetic peptide
QQSYSDPYT

SEQ ID NO: 597 - protein, 5 aa, Artificial Sequence
  Description of Artificial Sequence: Synthetic peptide
LYRMF

SEQ ID NO: 598 - protein, 17 aa, Artificial Sequence
  Description of Artificial Sequence: Synthetic peptide
SIWSSGGPTMYADSVKG

SEQ ID NO: 599 - protein, 10 aa, Artificial Sequence
  Description of Artificial Sequence: Synthetic peptide
EYPSTYYFDY

SEQ ID NO: 600 - protein, 11 aa, Artificial Sequence
  Description of Artificial Sequence: Synthetic peptide
RASQRISYYLT

SEQ ID NO: 601 - protein, 7 aa, Artificial Sequence
  Description of Artificial Sequence: Synthetic peptide
AASSLES

SEQ ID NO: 602 - protein, 9 aa, Artificial Sequence
  Description of Artificial Sequence: Synthetic peptide
QQAFSTPFT

SEQ ID NO: 603 - protein, 5 aa, Artificial Sequence
  Description of Artificial Sequence: Synthetic peptide
AYYMV

SEQ ID NO: 604 - protein, 17 aa, Artificial Sequence
  Description of Artificial Sequence: Synthetic peptide
YISPSGGQTQYADSVKG

SEQ ID NO: 605 - protein, 10 aa, Artificial Sequence
  Description of Artificial Sequence: Synthetic peptide
EAISSSSFDY

SEQ ID NO: 606 - protein, 11 aa, Artificial Sequence
  Description of Artificial Sequence: Synthetic peptide
RTRQSISNYLN

SEQ ID NO: 607 - protein, 7 aa, Artificial Sequence
  Description of Artificial Sequence: Synthetic peptide
AASSLQS

SEQ ID NO: 608 - protein, 9 aa, Artificial Sequence
  Description of Artificial Sequence: Synthetic peptide
QQSYDIPFT

SEQ ID NO: 609 - protein, 5 aa, Artificial Sequence
  Description of Artificial Sequence: Synthetic peptide
EYDMA

SEQ ID NO: 610 - protein, 17 aa, Artificial Sequence
  Description of Artificial Sequence: Synthetic peptide
YIVSSGGFTSYADSVKG

SEQ ID NO: 611 - protein, 10 aa, Artificial Sequence
  Description of Artificial Sequence: Synthetic peptide
WAGWIAAADY

SEQ ID NO: 612 - protein, 11 aa, Artificial Sequence
  Description of Artificial Sequence: Synthetic peptide
RASQSISNYLN

SEQ ID NO: 613 - protein, 7 aa, Artificial Sequence
  Description of Artificial Sequence: Synthetic peptide
AASSLQS

SEQ ID NO: 614 - protein, 9 aa, Artificial Sequence
  Description of Artificial Sequence: Synthetic peptide
QQSYSTPQT

SEQ ID NO: 615 - protein, 5 aa, Artificial Sequence
  Description of Artificial Sequence: Synthetic peptide
AYQMA

SEQ ID NO: 616 - protein, 17 aa, Artificial Sequence
  Description of Artificial Sequence: Synthetic peptide
VIYSSGGYTDYADSVKG

SEQ ID NO: 617 - protein, 10 aa, Artificial Sequence
  Description of Artificial Sequence: Synthetic peptide
HNWNDGAFDI

SEQ ID NO: 618 - protein, 11 aa, Artificial Sequence
  Description of Artificial Sequence: Synthetic peptide
RASQSISSYLN

SEQ ID NO: 619 - protein, 7 aa, Artificial Sequence
  Description of Artificial Sequence: Synthetic peptide
AASSLQS

SEQ ID NO: 620 - protein, 8 aa, Artificial Sequence
  Description of Artificial Sequence: Synthetic peptide
QQSYSTLT

SEQ ID NO: 621 - protein, 5 aa, Artificial Sequence
  Description of Artificial Sequence: Synthetic peptide
WYAMH

SEQ ID NO: 622 - protein, 17 aa, Artificial Sequence
  Description of Artificial Sequence: Synthetic peptide
GIYSSGGYTKYADSVKG

SEQ ID NO: 623 - protein, 11 aa, Artificial Sequence
  Description of Artificial Sequence: Synthetic peptide
DLSNGDDVFDI

SEQ ID NO: 624 - protein, 11 aa, Artificial Sequence
  Description of Artificial Sequence: Synthetic peptide
RASQSINFYLN

SEQ ID NO: 625 - protein, 7 aa, Artificial Sequence
  Description of Artificial Sequence: Synthetic peptide
VASSLES

SEQ ID NO: 626 - protein, 9 aa, Artificial Sequence
  Description of Artificial Sequence: Synthetic peptide
LQSYSAPYT

SEQ ID NO: 627 - protein, 5 aa, Artificial Sequence
  Description of Artificial Sequence: Synthetic peptide
YYQMG

SEQ ID NO: 628 - protein, 17 aa, Artificial Sequence
  Description of Artificial Sequence: Synthetic peptide
SIYPSGGMTDYADSVKG

SEQ ID NO: 629 - protein, 11 aa, Artificial Sequence
  Description of Artificial Sequence: Synthetic peptide
GSPWGDDAFDI

SEQ ID NO: 630 - protein, 11 aa, Artificial Sequence
  Description of Artificial Sequence: Synthetic peptide
RTSRRIGTYLN

SEQ ID NO: 631 - protein, 7 aa, Artificial Sequence
  Description of Artificial Sequence: Synthetic peptide
GASSLQS

SEQ ID NO: 632 - protein, 9 aa, Artificial Sequence
  Description of Artificial Sequence: Synthetic peptide
QQSFSSPWT

SEQ ID NO: 633 - protein, 5 aa, Artificial Sequence
  Description of Artificial Sequence: Synthetic peptide
WYPMQ

SEQ ID NO: 634 - protein, 17 aa, Artificial Sequence
  Description of Artificial Sequence: Synthetic peptide
YIYPSGGGTDYADSVKG

SEQ ID NO: 635 - protein, 11 aa, Artificial Sequence
  Description of Artificial Sequence: Synthetic peptide
SSGWLGDAFDI

SEQ ID NO: 636 - protein, 11 aa, Artificial Sequence
  Description of Artificial Sequence: Synthetic peptide
RASQSIATYLN

SEQ ID NO: 637 - protein, 7 aa, Artificial Sequence
  Description of Artificial Sequence: Synthetic peptide
AASSLQS

SEQ ID NO: 638 - protein, 9 aa, Artificial Sequence
  Description of Artificial Sequence: Synthetic peptide
QQSYSTRET

SEQ ID NO: 639 - protein, 5 aa, Artificial Sequence
  Description of Artificial Sequence: Synthetic peptide
WYTMH

SEQ ID NO: 640 - protein, 17 aa, Artificial Sequence
  Description of Artificial Sequence: Synthetic peptide
VIYPSGGPTSYADSVKG

SEQ ID NO: 641 - protein, 11 aa, Artificial Sequence
  Description of Artificial Sequence: Synthetic peptide
DGSGSYLGFDY

SEQ ID NO: 642 - protein, 11 aa, Artificial Sequence
  Description of Artificial Sequence: Synthetic peptide
RASQSISSYLN

SEQ ID NO: 643 - protein, 7 aa, Artificial Sequence
  Description of Artificial Sequence: Synthetic peptide
AASSLQS

SEQ ID NO: 644 - protein, 9 aa, Artificial Sequence
  Description of Artificial Sequence: Synthetic peptide
QQTYTTPWT

SEQ ID NO: 645 - protein, 5 aa, Artificial Sequence
  Description of Artificial Sequence: Synthetic peptide
SYPMG

SEQ ID NO: 646 - protein, 17 aa, Artificial Sequence
  Description of Artificial Sequence: Synthetic peptide
RISSSGGMTIYADSVKG

SEQ ID NO: 647 - protein, 9 aa, Artificial Sequence
  Description of Artificial Sequence: Synthetic peptide
DDWNVGMDV

SEQ ID NO: 648 - protein, 11 aa, Artificial Sequence
  Description of Artificial Sequence: Synthetic peptide
RASQDISNWLA

SEQ ID NO: 649 - protein, 7 aa, Artificial Sequence
  Description of Artificial Sequence: Synthetic peptide
AASSLQT

SEQ ID NO: 650 - protein, 9 aa, Artificial Sequence
  Description of Artificial Sequence: Synthetic peptide
QQSYSLPWT

SEQ ID NO: 651 - protein, 5 aa, Artificial Sequence
  Description of Artificial Sequence: Synthetic peptide
LYDMT

SEQ ID NO: 652 - protein, 17 aa, Artificial Sequence
  Description of Artificial Sequence: Synthetic peptide
GISSSGGVTIYADSVKG

SEQ ID NO: 653 - protein, 15 aa, Artificial Sequence
  Description of Artificial Sequence: Synthetic peptide
TYYYDSSGYADAFDI

SEQ ID NO: 654 - protein, 11 aa, Artificial Sequence
  Description of Artificial Sequence: Synthetic peptide
RASQSINTYLN

SEQ ID NO: 655 - protein, 7 aa, Artificial Sequence
  Description of Artificial Sequence: Synthetic peptide
AASTLES

SEQ ID NO: 656 - protein, 9 aa, Artificial Sequence
  Description of Artificial Sequence: Synthetic peptide
QQSYSTPPT

SEQ ID NO: 657 - protein, 5 aa, Artificial Sequence
  Description of Artificial Sequence: Synthetic peptide
VYLMH

SEQ ID NO: 658 - protein, 17 aa, Artificial Sequence
  Description of Artificial Sequence: Synthetic peptide
GISPSGGYTQYADSVKG

SEQ ID NO: 659 - protein, 9 aa, Artificial Sequence
  Description of Artificial Sequence: Synthetic peptide
PGGLDAFDI

SEQ ID NO: 660 - protein, 11 aa, Artificial Sequence
  Description of Artificial Sequence: Synthetic peptide
RASQSISSYLN

SEQ ID NO: 661 - protein, 7 aa, Artificial Sequence
  Description of Artificial Sequence: Synthetic peptide
AASSLQS

SEQ ID NO: 662 - protein, 9 aa, Artificial Sequence
  Description of Artificial Sequence: Synthetic peptide
QQSYSTPLT

SEQ ID NO: 663 - protein, 5 aa, Artificial Sequence
  Description of Artificial Sequence: Synthetic peptide
RYIMW

SEQ ID NO: 664 - protein, 17 aa, Artificial Sequence
  Description of Artificial Sequence: Synthetic peptide
GIYSSGGYTQYADSVKG

SEQ ID NO: 665 - protein, 10 aa, Artificial Sequence
  Description of Artificial Sequence: Synthetic peptide
ELEGLGGFDY

SEQ ID NO: 666 - protein, 11 aa, Artificial Sequence
  Description of Artificial Sequence: Synthetic peptide
RASQGISSWLA

SEQ ID NO: 667 - protein, 7 aa, Artificial Sequence
  Description of Artificial Sequence: Synthetic peptide
ATSGLQS

SEQ ID NO: 668 - protein, 9 aa, Artificial Sequence
  Description of Artificial Sequence: Synthetic peptide
QQAKSFPLT

SEQ ID NO: 669 - protein, 5 aa, Artificial Sequence
  Description of Artificial Sequence: Synthetic peptide
DYTMY

SEQ ID NO: 670 - protein, 17 aa, Artificial Sequence
  Description of Artificial Sequence: Synthetic peptide
SIVPSGGHTLYADSVKG

SEQ ID NO: 671 - protein, 13 aa, Artificial Sequence
  Description of Artificial Sequence: Synthetic peptide
DHLSSWYGGFFDY

SEQ ID NO: 672 - protein, 11 aa, Artificial Sequence
  Description of Artificial Sequence: Synthetic peptide
RASQSISSYLN

SEQ ID NO: 673 - protein, 7 aa, Artificial Sequence
  Description of Artificial Sequence: Synthetic peptide
AASSLQS

SEQ ID NO: 674 - protein, 9 aa, Artificial Sequence
  Description of Artificial Sequence: Synthetic peptide
QQSYSTRYT

SEQ ID NO: 675 - protein, 5 aa, Artificial Sequence
  Description of Artificial Sequence: Synthetic peptide
GYDMM

SEQ ID NO: 676 - protein, 17 aa, Artificial Sequence
  Description of Artificial Sequence: Synthetic peptide
VISSSGGNTAYADSVKG

SEQ ID NO: 677 - protein, 10 aa, Artificial Sequence
  Description of Artificial Sequence: Synthetic peptide
ESSGLYYFDY

SEQ ID NO: 678 - protein, 11 aa, Artificial Sequence
  Description of Artificial Sequence: Synthetic peptide
RASQSITIYLN

SEQ ID NO: 679 - protein, 7 aa, Artificial Sequence
  Description of Artificial Sequence: Synthetic peptide
GASNLHS

SEQ ID NO: 680 - protein, 9 aa, Artificial Sequence
  Description of Artificial Sequence: Synthetic peptide
QQSYDTPLT

SEQ ID NO: 681 - protein, 5 aa, Artificial Sequence
  Description of Artificial Sequence: Synthetic peptide
WYPMY

SEQ ID NO: 682 - protein, 17 aa, Artificial Sequence
  Description of Artificial Sequence: Synthetic peptide
SIGSSGGPTPYADSVKG

SEQ ID NO: 683 - protein, 10 aa, Artificial Sequence
  Description of Artificial Sequence: Synthetic peptide
WADYGGSLDY

SEQ ID NO: 684 - protein, 13 aa, Artificial Sequence
  Description of Artificial Sequence: Synthetic peptide
SGSSSNIGNNAVS

SEQ ID NO: 685 - protein, 7 aa, Artificial Sequence
  Description of Artificial Sequence: Synthetic peptide
YDDLLPS

SEQ ID NO: 686 - protein, 11 aa, Artificial Sequence
  Description of Artificial Sequence: Synthetic peptide
AAWDDSLNGFV

SEQ ID NO: 687 - protein, 5 aa, Artificial Sequence
  Description of Artificial Sequence: Synthetic peptide
RYPMM

SEQ ID NO: 688 - protein, 17 aa, Artificial Sequence
  Description of Artificial Sequence: Synthetic peptide
VIYPSGGDTFYADSVKG

SEQ ID NO: 689 - protein, 11 aa, Artificial Sequence
  Description of Artificial Sequence: Synthetic peptide
GDDYLWEAAVY

SEQ ID NO: 690 - protein, 11 aa, Artificial Sequence
  Description of Artificial Sequence: Synthetic peptide
RASQNIGNDVA

SEQ ID NO: 691 - protein, 7 aa, Artificial Sequence
  Description of Artificial Sequence: Synthetic peptide
HASTRAY

SEQ ID NO: 692 - protein, 10 aa, Artificial Sequence
  Description of Artificial Sequence: Synthetic peptide
QQFYDWPAHT

SEQ ID NO: 693 - protein, 5 aa, Artificial Sequence
  Description of Artificial Sequence: Synthetic peptide
YYHMW

SEQ ID NO: 694 - protein, 17 aa, Artificial Sequence
  Description of Artificial Sequence: Synthetic peptide
GISPSGGFTFYADSVKG

SEQ ID NO: 695 - protein, 14 aa, Artificial Sequence
  Description of Artificial Sequence: Synthetic peptide
DYYYDSSGYSPLGY

SEQ ID NO: 696 - protein, 11 aa, Artificial Sequence
  Description of Artificial Sequence: Synthetic peptide
RASQSISIYLN

SEQ ID NO: 697 - protein, 7 aa, Artificial Sequence
  Description of Artificial Sequence: Synthetic peptide
GASQLES

SEQ ID NO: 698 - protein, 9 aa, Artificial Sequence
  Description of Artificial Sequence: Synthetic peptide
QQSYNVPYT

SEQ ID NO: 699 - protein, 5 aa, Artificial Sequence
  Description of Artificial Sequence: Synthetic peptide
FYKMI

SEQ ID NO: 700 - protein, 17 aa, Artificial Sequence
  Description of Artificial Sequence: Synthetic peptide
SISSSGGSTQYADSVKG

SEQ ID NO: 701 - protein, 10 aa, Artificial Sequence
  Description of Artificial Sequence: Synthetic peptide
DRVDLGYLDY

SEQ ID NO: 702 - protein, 11 aa, Artificial Sequence
  Description of Artificial Sequence: Synthetic peptide
RTSQNINTYLN

SEQ ID NO: 703 - protein, 7 aa, Artificial Sequence
  Description of Artificial Sequence: Synthetic peptide
GVSSLHR

SEQ ID NO: 704 - protein, 9 aa, Artificial Sequence
  Description of Artificial Sequence: Synthetic peptide
QQSYSSPWT

SEQ ID NO: 705 - protein, 5 aa, Artificial Sequence
  Description of Artificial Sequence: Synthetic peptide
QYLMM

SEQ ID NO: 706 - protein, 17 aa, Artificial Sequence
  Description of Artificial Sequence: Synthetic peptide
SIYPSGGYTSYADSVKG

SEQ ID NO: 707 - protein, 10 aa, Artificial Sequence
  Description of Artificial Sequence: Synthetic peptide
VSTAVADNDY

SEQ ID NO: 708 - protein, 11 aa, Artificial Sequence
  Description of Artificial Sequence: Synthetic peptide
RASQTIDNYLH

SEQ ID NO: 709 - protein, 7 aa, Artificial Sequence
  Description of Artificial Sequence: Synthetic peptide
DASSLQS

SEQ ID NO: 710 - protein, 10 aa, Artificial Sequence
  Description of Artificial Sequence: Synthetic peptide
QQSYDTPQYT

SEQ ID NO: 711 - protein, 5 aa, Artificial Sequence
  Description of Artificial Sequence: Synthetic peptide
LYDMN

SEQ ID NO: 712 - protein, 17 aa, Artificial Sequence
  Description of Artificial Sequence: Synthetic peptide
GISPSGGQTMYADSVKG

SEQ ID NO: 713 - protein, 9 aa, Artificial Sequence
  Description of Artificial Sequence: Synthetic peptide
QPMISAFDI

SEQ ID NO: 714 - protein, 11 aa, Artificial Sequence
  Description of Artificial Sequence: Synthetic peptide
RASQSISSYLN

SEQ ID NO: 715 - protein, 7 aa, Artificial Sequence
  Description of Artificial Sequence: Synthetic peptide
AASSLQS

SEQ ID NO: 716 - protein, 10 aa, Artificial Sequence
  Description of Artificial Sequence: Synthetic peptide
QQSYSTPPWT

SEQ ID NO: 717 - protein, 5 aa, Artificial Sequence
  Description of Artificial Sequence: Synthetic peptide
LYAMW

SEQ ID NO: 718 - protein, 17 aa, Artificial Sequence
  Description of Artificial Sequence: Synthetic peptide
YISSSGGFTSYADSVKG

SEQ ID NO: 719 - protein, 10 aa, Artificial Sequence
  Description of Artificial Sequence: Synthetic peptide
YRVGVAATDY

SEQ ID NO: 720 - protein, 11 aa, Artificial Sequence
  Description of Artificial Sequence: Synthetic peptide
RASQSISTYLN

SEQ ID NO: 721 - protein, 7 aa, Artificial Sequence
  Description of Artificial Sequence: Synthetic peptide
AASSLQS

SEQ ID NO: 722 - protein, 9 aa, Artificial Sequence
  Description of Artificial Sequence: Synthetic peptide
QQSYSTPHT

SEQ ID NO: 723 - protein, 5 aa, Artificial Sequence
  Description of Artificial Sequence: Synthetic peptide
GYIMH

SEQ ID NO: 724 - protein, 17 aa, Artificial Sequence
  Description of Artificial Sequence: Synthetic peptide
WIYPSGGWTEYADSVKG

SEQ ID NO: 725 - protein, 10 aa, Artificial Sequence
  Description of Artificial Sequence: Synthetic peptide
DAPGVGAIDY

SEQ ID NO: 726 - protein, 11 aa, Artificial Sequence
  Description of Artificial Sequence: Synthetic peptide
RASQDISVYLN

SEQ ID NO: 727 - protein, 7 aa, Artificial Sequence
  Description of Artificial Sequence: Synthetic peptide
GGASLQS

SEQ ID NO: 728 - protein, 9 aa, Artificial Sequence
  Description of Artificial Sequence: Synthetic peptide
QQSYSLPFT

SEQ ID NO: 729 - protein, 5 aa, Artificial Sequence
  Description of Artificial Sequence: Synthetic peptide
MYWMQ

SEQ ID NO: 730 - protein, 17 aa, Artificial Sequence
  Description of Artificial Sequence: Synthetic peptide
YIYPSGGPTKYADSVKG

SEQ ID NO: 731 - protein, 11 aa, Artificial Sequence
  Description of Artificial Sequence: Synthetic peptide
PSGSYGDAFDI

SEQ ID NO: 732 - protein, 11 aa, Artificial Sequence
  Description of Artificial Sequence: Synthetic peptide
RASQNISSYLN

SEQ ID NO: 733 - protein, 7 aa, Artificial Sequence
  Description of Artificial Sequence: Synthetic peptide
AASSLQS

SEQ ID NO: 734 - protein, 9 aa, Artificial Sequence
  Description of Artificial Sequence: Synthetic peptide
QQSYSTPRT

SEQ ID NO: 735 - protein, 5 aa, Artificial Sequence
  Description of Artificial Sequence: Synthetic peptide
LYIMG

SEQ ID NO: 736 - protein, 17 aa, Artificial Sequence
  Description of Artificial Sequence: Synthetic peptide
GIYPSGGFTMYADSVKG

SEQ ID NO: 737 - protein, 10 aa, Artificial Sequence
  Description of Artificial Sequence: Synthetic peptide
ESSGVAAPDY

SEQ ID NO: 738 - protein, 16 aa, Artificial Sequence
  Description of Artificial Sequence: Synthetic peptide
RSSQSLLHSRGYNYLD

SEQ ID NO: 739 - protein, 7 aa, Artificial Sequence
  Description of Artificial Sequence: Synthetic peptide
LGSNRAS

SEQ ID NO: 740 - protein, 8 aa, Artificial Sequence
  Description of Artificial Sequence: Synthetic peptide
MQALQRRT

SEQ ID NO: 741 - protein, 5 aa, Artificial Sequence
  Description of Artificial Sequence: Synthetic peptide
YYTMI

SEQ ID NO: 742 - protein, 17 aa, Artificial Sequence
  Description of Artificial Sequence: Synthetic peptide
GIRSSGGGTRYADSVKG

SEQ ID NO: 743 - protein, 18 aa, Artificial Sequence
  Description of Artificial Sequence: Synthetic peptide
DGSRYSYGSIYYYYGMDA

SEQ ID NO: 744 - protein, 109 aa, Artificial Sequence
  Description of Artificial Sequence: Synthetic polypeptide
QDIQMTQSPSSLSASVGDSVTISCRASQSISMYLNWYQHKPGKAPKLLIYGTSSLQSGVPSRFSGSGPGGTDFTLTISSLQPEDFATYYCQQSYSAPWTFGQGTKVEIK

SEQ ID NO: 745 - protein, 136 aa, Artificial Sequence
  Description of Artificial Sequence: Synthetic polypeptide
EVQLLESGGGLVQPGGSLRLSCAASGFTFSLYQMTWVRQAPGKGLEWVSGIWPSGGFTDYADSVKGRFTISRDNSKNTLYLQMNSLRAEDTAVYYCARVSTAVADNDYWGQGTLVTVSSASTKGPSVFPLAPSSKS

SEQ ID NO: 746 - protein, 108 aa, Artificial Sequence
  Description of Artificial Sequence: Synthetic polypeptide
QDIQMTQSPSSLSASVGDRVTITCRASQRISFYLNWFQQKPGKAPNLLIYGASSLQSGVPSRFSGSGSGTDFTLTISSLQPKDFGTYYCQQTFSTPNTFGQGTKLEIK

SEQ ID NO: 747 - protein, 138 aa, Artificial Sequence
  Description of Artificial Sequence: Synthetic polypeptide
EVQLLESGGGLVQPGGSLRLSCAASGFTFSPYPMQWVRQAPGKGLEWVSSISSSGGMTEYADSVKGRFTISRDNSKNTLYLQMNSLRAEDTAVYYCARDDYGGKGGAFDIWGQGTMVTVSSASTKGPSVFPLAPSSKS

SEQ ID NO: 748 - protein, 108 aa, Artificial Sequence
  Description of Artificial Sequence: Synthetic polypeptide
QDIQMTQSPSSLSASVGDRVTITCRASQSISSYLNWYQQKPGKAPKLLIYAASSLQSGVPSRFSGSGSGTDFTLTISSLQPEDFATYYCQQSYSTLWTFGQGTKVEIK

SEQ ID NO: 749 - protein, 136 aa, Artificial Sequence
  Description of Artificial Sequence: Synthetic polypeptide
EVQLLESGGGLVQPGGSLRLSCAASGFTFSKYFMGWVRQAPGKGLEWVSVIGSSGGWTSYADSVKGRFTISRDNSKNTLYLQMNSLRAEDTAVYYCARVSTAVADNDYWGQGTLVTVSSASTKGPSVFPLAPSSKS

SEQ ID NO: 750 - protein, 107 aa, Artificial Sequence
  Description of Artificial Sequence: Synthetic polypeptide
QDIQMTQSPSSLSASVGDRVTITCRASQSISSYLNWYQQKPGKAPKLLIYGASSLQSGVPSRFSGSGSGTDFTLTISSLQPEDSATYYCQQSYTRWTFGQGTKVEIK

SEQ ID NO: 751 - protein, 137 aa, Artificial Sequence
  Description of Artificial Sequence: Synthetic polypeptide
EVQLLESGGGLVQPGGSLRLSCAASGFTFSRYHMVWVRQAPGKGLEWVSSISPSGGWTNYADSVKGRFTISRDNSKNTLYLQMNSLRAEDTAMYYCAREMATIAGQFDPWGQGTLVTVSSASTKGPSVFPLAPSSKS

SEQ ID NO: 752 - protein, 108 aa, Artificial Sequence
  Description of Artificial Sequence: Synthetic polypeptide
QDIQMTQSPSSLSASVGDRVTITCRASQSISTYLNWYQLKPGKAPKLLIYNAFSMERGVPSTISGSGSGTDFTLTISSLQPEDFATYYCQQSYTTPTTFGQGTKVEIK

SEQ ID NO: 753 - protein, 137 aa, Artificial Sequence
  Description of Artificial Sequence: Synthetic polypeptide
EVQLLESGGGLVQPGGSLRLSCAASGFTFSRYRMVWVRQAPGKGLEWVSSIYPSGGMTAYADSVKGRFTISRDNSKNTLYLQMNSLRAEDTAVYYCARDAVGIGDAFDIWGQGTMVTVSSASTKGPSVFPLAPSSKS

SEQ ID NO: 754 - protein, 105 aa, Artificial Sequence
  Description of Artificial Sequence: Synthetic polypeptide
QSALTQPPSVSVSPGQTASITCSGDKLGDKYTSWHQQKPGQSPVLVIYQDSKRPSGIPERFSGSNSGNTATLTISGTQAMDEADYYCQAWDSSTVFGGGTRLTVL

SEQ ID NO: 755 - protein, 138 aa, Artificial Sequence
  Description of Artificial Sequence: Synthetic polypeptide
EVQLLESGGGLVQPGGSLRLSCAASGFTFSYYPMQWVRQAPGKGLEWVSYIYPSGGLTSYADSVKGRFTISRDNSKNTLYLQMNSLRAEDTAVYYCARLFYGSGSVGFEYWGQGTLVTVSSASTKGPSVFPLAPSSKS

SEQ ID NO: 756 - protein, 108 aa, Artificial Sequence
  Description of Artificial Sequence: Synthetic polypeptide
QDIQMTQSPSFVSASVGDRVTITCRASQDISSWLVWYQQKPGKGPKLLIYDASNLQSGVPSRFSGGGSGTHFTLTISSLQPEDFATYYCQQADGFPLTFGGGTKVEMK

SEQ ID NO: 757 - protein, 135 aa, Artificial Sequence
  Description of Artificial Sequence: Synthetic polypeptide
EVQLLESGGGLVQPGGSLRLSCAASGFTFSLYNMNWVRQAPGKGLEWVSSISPSGGFTDYADSVKGRFTISRDNSKNTLYLQMNSLRAEDTAVYYCARDLDLGILDYWGQGTLVTVSSASTKGPSVFPLAPSSKS

SEQ ID NO: 758 - protein, 109 aa, Artificial Sequence
  Description of Artificial Sequence: Synthetic polypeptide
QDIQMTQSPSSLSASVGDRVTITCRASQSISSYLNWYQQKPGKAPKLLIYAASSLQSGVPSRFSGSGSGTDFTLTISSLQPEDFATYYCQQSYSTLMYTFGQGTKLEIK

SEQ ID NO: 759 - protein, 136 aa, Artificial Sequence
  Description of Artificial Sequence: Synthetic polypeptide
EVQLLESGGGLVQPGGSLRLSCAASGFTFSHYFMTWVRQAPGKGLEWVSSIVPSGGMTQYADSVKGRFTISRDNSKNTLYLQMNSLRAEDTAVYYCARDSYSSSWFDIWGQGTMVTVSSASTKGPSVFPLAPSSKS

SEQ ID NO: 760 - protein, 108 aa, Artificial Sequence
  Description of Artificial Sequence: Synthetic polypeptide
QDIQMTQSPSSLSASVGDTVTITCRASQGVSYYLAWFQQKPGKAPKSLIYGASSLQSGVPSKFSGSGSGTVFTLTISSLQPDDFATYYCQQYNTYPPTFGQGTRLDIK

SEQ ID NO: 761 - protein, 136 aa, Artificial Sequence
  Description of Artificial Sequence: Synthetic polypeptide
EVQLLESGGGLVQPGGSLRLSCAASGFTFSLYEMLWVRQAPGKGLEWVSVIYPSGGYTDYADSVKGRFTISRDNSKNTLYLQMNSLRAEDMAVYYCARSFSGFGEIDYWGQGTLVTVSSASTKGPSVFPLAPSSKS

SEQ ID NO: 762 - protein, 108 aa, Artificial Sequence
  Description of Artificial Sequence: Synthetic polypeptide
QDIQMTQSPSSLSASIGDRVTITCRASQYISTYLNWYEQKPGKAPKLLIYGTSSLQSGVPSRFSGSGSGTEFSLTISSLQPEDFATYYCQQSFTTPFTFGQGTKLEIK

SEQ ID NO: 763 - protein, 138 aa, Artificial Sequence
  Description of Artificial Sequence: Synthetic polypeptide
EVQLLESGGGLVQPGGSLRLSCAASGFTFSGYWMGWVRQAPGKGLEWVSSISSSGGWTQYADSVKGRFTISRDNSKNTLYLQMNSLRAEDTATYYCARDDEIAAGGAFDIWGQGAMVTVSSASTKGPSVFPLAPSSKS

SEQ ID NO: 764 - protein, 107 aa, Artificial Sequence
  Description of Artificial Sequence: Synthetic polypeptide
QDIQMTQSPSSLSASLGDRVTITCRASQNIDIYLNWYQQTPGKAPKLLIYGAYNLQSGVPSRFSGSGSGTDFTLTISSLQPEDFGTYYCQQSYGTPVFGQGTKLEIK

SEQ ID NO: 765 - protein, 136 aa, Artificial Sequence
  Description of Artificial Sequence: Synthetic polypeptide
EVQLLESGGGLVQPGGSLRLSCAASGFTFSGYFMMWVRQAPGKGLEWVSSIYSSGGYTDYADSVKGRFTISRDNSKNTLYLQMNSLRAEDTAVYYCAREVAGTYAFDIWGQGTMVTVSSASTKGPSVFPLAPSSKS

SEQ ID NO: 766 - protein, 108 aa, Artificial Sequence
  Description of Artificial Sequence: Synthetic polypeptide
QDIQMTQSPSSLSASVGDRVTVTCRASQRISTYLNWYQQKPGKAPKLLISGASSLQSGVPSRFSGSGSGTDFTLTISSLQPDDFATYYCQQSYNTPRTFGQGTKVEIR

SEQ ID NO: 767 - protein, 137 aa, Artificial Sequence
  Description of Artificial Sequence: Synthetic polypeptide
EVQLLESGGGLVQPGGSLRLSCAASGFTFSAYEMWWVRQAPGKGLEWVSYIGSSGGSTSYADSVKGRFTISRDNSKNTLYLQMNSLRAEDTAVYYCTGGNSSSFDAFDIWGQGTMVTVSSASTKGPSVFPLAPSSKS

SEQ ID NO: 768 - protein, 108 aa, Artificial Sequence
  Description of Artificial Sequence: Synthetic polypeptide
QDIQMTQSPSSLSASVGDRVTITCRASQSISIYVNWYQQKPGKAPNLLIFAASSLQRGVPSRFSGSGSGADFTLTISSLQPEDFATYYCQQSFSTPLTFGGGTKVEIK

SEQ ID NO: 769 - protein, 136 aa, Artificial Sequence
  Description of Artificial Sequence: Synthetic polypeptide
EVQLLESGGGLVQPGGSLRLSCAASGFTFSHYGMVWVRQAPGKGLEWVSYIVPSGGLTYYADSVKGRFTISRDNSKNTLYLQMNSLRAEDTAVYYCARVDYTGDGLGYWGQGTLVTVSSASTKGPSVFPLAPSSKS

SEQ ID NO: 770 - protein, 108 aa, Artificial Sequence
  Description of Artificial Sequence: Synthetic polypeptide
QDIQMTQSPSSLSASVGDRVTITCRASQGISSYLNWYQQKPGNAPNLLIYGASSLQSGVPSRFSGSGSGTDFTLTISSLQPEDFATYYCQESYSTLFTFGPGTTVEIK

SEQ ID NO: 771 - protein, 137 aa, Artificial Sequence
  Description of Artificial Sequence: Synthetic polypeptide
EVQLLESGGGLVQPGGSLRLSCAASGFTFSLYPMQWVRQAPGKGLEWVSSIGSSGGMTFYADSVKGRFTISRDNSKNTLYLQMNSLRAEDTAVYYCTREVGAAGFAFDIWGQGTMVTVSSASTKGPSVFPLAPSSKS

SEQ ID NO: 772 - protein, 108 aa, Artificial Sequence
  Description of Artificial Sequence: Synthetic polypeptide
QDIQMTQSPSSLSASVGDRVTLTCRASRTISFYLNWYQQKAGKAPELLIYGGSSLHSGVPSRFSGSGSGTDFSLTISNLQPEDIAVYYCQQSFSSPWTFGQGTKVEIK

SEQ ID NO: 773 - protein, 137 aa, Artificial Sequence
  Description of Artificial Sequence: Synthetic polypeptide
EVQLLESGGGLVQPGGSLRLSCAASGFTFSWYKMMWVRQAPGKGLEWVSSIYPSGGWTNYADSVKGRFTISRDNSKNTLYLQMNSLRAEDTAVYYCTRGSPWGDDAFDIWGQGTMVTVSSASTKGPSVFPLAPSSKS

SEQ ID NO: 774 - protein, 108 aa, Artificial Sequence
  Description of Artificial Sequence: Synthetic polypeptide
QDIQMIQSPSSLSASVGDRVTITCRASQSISGYLNWYQQRSGKAPKLLIFAASNLQTGVPSRFSGSGSGTDFTLTINNLQPEDFATYYCQQSHTPPKTFGPGTKVDIK

SEQ ID NO: 775 - protein, 136 aa, Artificial Sequence
  Description of Artificial Sequence: Synthetic polypeptide
EVQLLESGGGLVQPGGSLRLSCAASGFTFSEYDMMWVRQAPGKGLEWVSSIGSSGGMTYYADSVKGRFTISRDNSKNTLYLQMNSLRAEDTAVYYCARDQVAAAAIDYWGQGTLVTVSSASTKGPSVFPLAPSSKS

SEQ ID NO: 776 - protein, 109 aa, Artificial Sequence
  Description of Artificial Sequence: Synthetic polypeptide
QDIQMTQSPSSLSASVGDRVTITCRASQSISSYLNWYQQKPGKAPKLLIYAASSLQSGVPSRFSGSGSGTDFTLTISSLQPEDFATYYCQQSYSTPPYTFGQGTKLEIK

SEQ ID NO: 777 - protein, 137 aa, Artificial Sequence
  Description of Artificial Sequence: Synthetic polypeptide
EVQLLESGGGLVQPGGSLRLSCAASGFTFSPYAMTWVRQAPGKGLEWVSVIYPSGGFTDYADSVKGRFTISRDNSKNTLYLQMNSLRAEDTAMYYCARASGSYLDAFDIWGQGTMVTVSSASTKGPSVFPLAPSSKS

SEQ ID NO: 778 - protein, 108 aa, Artificial Sequence
  Description of Artificial Sequence: Synthetic polypeptide
QDIQMTQSPSSLSASVGDRVTITCRASQSISSYLNWYQQKPGKAPKLLIYAASSLQSGVPSKFSGSGSGTDYTLTISSLQPEDFATYYCQQTYTTPWTFGQGTKVEIK

SEQ ID NO: 779 - protein, 135 aa, Artificial Sequence
  Description of Artificial Sequence: Synthetic polypeptide
EVQLLESGGGLVQPGGSLRLSCAASGFTFSSYPMGWVRQAPGKGLEWVSRISSSGGMTIYADSVKGRFTISRDNSKNTLYLQMNSLRAEDTAVYYCARDDWNVGMDVWGQGTTVTVSSASTKGPSVFPLAPSSKS

SEQ ID NO: 780 - protein, 108 aa, Artificial Sequence
  Description of Artificial Sequence: Synthetic polypeptide
QDIQMTQSPSSLSASVGDRVTITCRASQSINTYLNWYQQKPGKAPKVLIHAASTLESGVPSRFSGSGSGTDFTLTISSLQPEDFATYYCQQSYSTPYTFGQGTKLEVR

SEQ ID NO: 781 - protein, 135 aa, Artificial Sequence
  Description of Artificial Sequence: Synthetic polypeptide
EVQLLESGGGLVQPGGSLRLSCAASGFTFSDYDMEWVRQAPGKGLEWVSSISPSGGSTIYADSVKGRFTISRDNSKNTLYLQMNSLRAEDTAVYYCARQGLLTAFDIWGQGTMVTVSSASTKGPSVFPLAPSSKS

SEQ ID NO: 782 - protein, 108 aa, Artificial Sequence
  Description of Artificial Sequence: Synthetic polypeptide
QDIQMTQSPSSLSASVGDRVTITCRASQSISSYLNWYQQKPGKAPKLLIYAASSLQSGVPSRFSGSGSGTDFTLTISSLQPEDFATYYCQQSYSTPITFGGGTKVEIK

SEQ ID NO: 783 - protein, 136 aa, Artificial Sequence
  Description of Artificial Sequence: Synthetic polypeptide
EVQLLESGGGLVQPGGSLRLSCAASGFTFSYYTMLWVRQAPGKGLEWVSSIYPSGGFTMYADSVKGRFTISRDNSKNTLYLQMNSLRAEDTAVYYCARVDTAMAMIDYWGQGTLVTVSSASTKGPSVFPLAPSSKS

SEQ ID NO: 784 - protein, 108 aa, Artificial Sequence
  Description of Artificial Sequence: Synthetic polypeptide
QDIQMTQSPSSLSASVGDRVIITCRASRSIATYLNWYQQKPGKAPNLLIFGASTLQSGVPSRFSGSGSGTDFTLTISDLQPEDFATYYCQQSFSDPYTFGQGTNLEMK

SEQ ID NO: 785 - protein, 137 aa, Artificial Sequence
  Description of Artificial Sequence: Synthetic polypeptide
EVQLLESGGGLVQPGGSLRLSCAASGFTFSAYMMIWVRQAPGKGLEWVSVIYPSGGVTMYADSVKGRFTISRDNSKNTLYLQMNSLRAEDTAVYYCARGTVGASDAFDIWGQGTMVTVSSASTKGPSVFPLAPSSKS

SEQ ID NO: 786 - protein, 106 aa, Artificial Sequence
  Description of Artificial Sequence: Synthetic polypeptide
QYELTQAPSVSVAPGQTASITCSGDKLGNRYTSWYQQKPGQSPVLVIFQDNKRPSGIPERFSGSNSGNTATLTISGTQAMDEADYYCQALDSNTYVFGTGTKVTVL

SEQ ID NO: 787 - protein, 139 aa, Artificial Sequence
  Description of Artificial Sequence: Synthetic polypeptide
EVQLLESGGGLVQPGGSLRLSCAASGFTFSWYSMGWVRQAPGKGLEWVSYIVPSGGYTMYADSVKGRFTISRDNSKNTLYLQMNSLRAEDTAVYYCARDPGVSYYYYGMDVWGQGTTVTVSSASTKGPSVFPLAPSSKS

SEQ ID NO: 788 - protein, 108 aa, Artificial Sequence
  Description of Artificial Sequence: Synthetic polypeptide
QDIQMTQSPSSLSASVGDRVTITCRASQSISSYLNWYQQKPGKAPKLLIYAASSLQSGVPSRFSGSGSGTDFTLTISSLQPEDFATYYCQQSYSTPPTFGQGTRLEIK

SEQ ID NO: 789 - protein, 137 aa, Artificial Sequence
  Description of Artificial Sequence: Synthetic polypeptide
EVQLLESGGGLVQPGGSLRLSCAASGFTFSAYTMWWVRQAPGKGLEWVSSIWPSGGSTFYADSVKGRFTISRDNSKNTLYLQMNSLRAEDTAVYYCARTYDSSAGEVDYWGQGTLVTVSSASTKGPSVFPLAPSSKS

SEQ ID NO: 790 - protein, 108 aa, Artificial Sequence; identical to SEQ ID NO: 746
  Description of Artificial Sequence: Synthetic polypeptide

SEQ ID NO: 791 - protein, 138 aa, Artificial Sequence; identical to SEQ ID NO: 747
  Description of Artificial Sequence: Synthetic polypeptide

SEQ ID NO: 792 - protein, 108 aa, Artificial Sequence
  Description of Artificial Sequence: Synthetic polypeptide
QDIQMTQSPLSLSAFVGDRVTITCRASRDISVYLNWYQLKSGKAPKLLIYGASSLQSGVPSRFSGSGSGTDFTLTITSLQPEDFATYYCQQSYSIPFTFGGGTKVETK

SEQ ID NO: 793 - protein, 134 aa, Artificial Sequence
  Description of Artificial Sequence: Synthetic polypeptide
EVQLLESGGGLVQPGGSLRLSCAASGFTFSLYLMHWVRQAPGKGLEWVSSIYSSGGFTTYADSVKGRFTISRDNSKNTLYLQMNSLRAEDTAVYYCARDTDYGMDVWGQGTTVTVSSASTKGPSVFPLAPSSKS

SEQ ID NO: 794 - protein, 108 aa, Artificial Sequence
  Description of Artificial Sequence: Synthetic polypeptide
QDIQMTQSPSSLSASVGDGVTITCRASQSISTYLNWYQQRPGKAPKLLIYGASSLQSGVPSRFSGSGSGTDFTLTISSLQREDFATYYCQQSFSTPWTFGQGTRVEIK

SEQ ID NO: 795 - protein, 136 aa, Artificial Sequence
  Description of Artificial Sequence: Synthetic polypeptide
EVQLLESGGGLVQPGGSLRLSCAASGFTFSWYEMSWVRQAPGKGLEWVSRIWPSGGVTMYADSVKGRFTISRDNSKNTLYLQMNSLRAEDTAVYYCTRTSITTVGMDVWGQGTTVTVSSASTKGPSVFPLAPSSKS

SEQ ID NO: 796 - protein, 108 aa, Artificial Sequence
  Description of Artificial Sequence: Synthetic polypeptide
QDIQMTQSPSSLSASVGDRVTITCRASQSISIYLNWYQQKPEKAPKLLIFAASTLQSGVPSRFSGSGSGTDFTLTISNLQPEDFATYYCQQSHSIPPTFGLGTKVEVK

SEQ ID NO: 797 - protein, 136 aa, Artificial Sequence
  Description of Artificial Sequence: Synthetic polypeptide
EVQLLESGGGLVQPGGSLRLSCAASGFTFSMYPMMWVRQAPGKGLEWVSYISPSGGMTDYADSVKGRFTISRDNSKNTLYLQMNSLRAEDMAVYYCARVAGSSDAFDIWGQGTMVTVSSASTKGPSVFPLAPSSKS

SEQ ID NO: 798 - protein, 113 aa, Artificial Sequence
  Description of Artificial Sequence: Synthetic polypeptide
QDIQMTQSPLSLPVTPGEPASISCRSSQSLLHSNGYNYLDWYLQKPGQSPQLLIYLGSNRASGVPDRFSGSGSGTDFTLKISRVEAEDVGVYYCMQALQTPLTFGPGTKVHIK

SEQ ID NO: 799 - protein, 131 aa, Artificial Sequence
  Description of Artificial Sequence: Synthetic polypeptide
EVQLLESGGGLVQPGGSLRLSCAASGFTFSAYPMNWVRQAPGKGLEWVSRISSSGGNTSYADSVKGRFTISRDNSKNTLYLQMNSLRAEDTAVYYCALGYLGYWGQGTLVTVSSASTKGPSVFPLAPSSKS

SEQ ID NO: 800 - protein, 108 aa, Artificial Sequence
  Description of Artificial Sequence: Synthetic polypeptide
QDIQMTQSPSSLSASVGDRVTITCRASQSISTYLNWYQQKPGKAPKLLIYGASSLQSGVPSRFSGSGSGTDFTLTISSLQPEDFTIYYCQQSYSDPYTFGQGTKLDIK

SEQ ID NO: 801 - protein, 136 aa, Artificial Sequence
  Description of Artificial Sequence: Synthetic polypeptide
EVQLLESGGGLVQPGGSLRLSCAASGFTFSLYRMFWVRQAPGKGLEWVSSIWSSGGPTMYADSVKGRFTISRDNSKNTLYLQMNSLRAEDTAVYYCAREYPSTYYFDYWGQGTLVTVSSASTKGPSVFPLAPSSKS

SEQ ID NO: 802 - protein, 108 aa, Artificial Sequence
  Description of Artificial Sequence: Synthetic polypeptide
QDIQMTQSPSSLSASVGDRVTITCRASQTIDDDLIWYQQKPGRAPKLLIYAASSLQSGVPSRFSGSGSGTDFTLTITSLQPEDFATYYCQQSYNIPRTFGQGTKLESK

SEQ ID NO: 803 - protein, 141 aa, Artificial Sequence
  Description of Artificial Sequence: Synthetic polypeptide
EVQLLESGGGLVQPGGSLRLSCAASGFTFSNYDMMWVRQAPGKGLEWVSYISPSGGFTRYADSVKGRFTISRDNSKNTLYLQMNSLRAEDTATYYCAKDIYYYNWGPSHYFDSWGQGTLVTVSSASTKGPSVFPLAPSSKS

SEQ ID NO: 804 - protein, 108 aa, Artificial Sequence
  Description of Artificial Sequence: Synthetic polypeptide
QDIQMTQSPSSLSASVGDSVTITCRASQSISGYINWYQQKAGKAPKLLIYAASSLQSGVPSRFSGSGSGTHFTLTISSLQPEDFATYYCQQYVSYPFTFGPGTKVDIK

SEQ ID NO: 805 - protein, 138 aa, Artificial Sequence
  Description of Artificial Sequence: Synthetic polypeptide
EVQLLESGGGLVQPGGSLRLSCAASGFTFSQYGMQWVRQAPGKGLEWVSSIRSSGGATRYADSVKGRFTISRDNSKNTLYLQMNSLRAEDTAVYYCARDGYYDSSGYPDYWGQGTLVTVSSASTKGPSVFPLAPSSKS

SEQ ID NO: 806 - protein, 108 aa, Artificial Sequence
  Description of Artificial Sequence: Synthetic polypeptide
QDIQMTQSPSSLSASVGDRVAITCRASQSIDTYLNWYQQKPGKAPKLLIYDASNLEIGVPSRFSGSGSGTDFTFIINSLQPEDVATYYCQHYLYAPYSFGQGTKLEIK

SEQ ID NO: 807 - protein, 137 aa, Artificial Sequence
  Description of Artificial Sequence: Synthetic polypeptide
EVQLLESGGGLVQPGGSLRLSCAASGFTFSNYWMMWVRQAPGKGLEWVSGIGSSGGFTSYADSVKGRFTISRDNSKNTLYLQMNSLRAEDTAVYYCAKGSYSDYGVFESWGQGTLVTVSSASTKGPSVFPLAPSSKS

SEQ ID NO: 808 - protein, 108 aa, Artificial Sequence
  Description of Artificial Sequence: Synthetic polypeptide
QDIQMTQSPSSLSASVGDRVTITCRASQSISSYLNWYQQKPGKAPKLLIYAASSLQSGVPSRFSGSGSGTDFTLTISSLQPEDFATYYCQQSYSTPPTFGQGTKVEIK

SEQ ID NO: 809 - protein, 136 aa, Artificial Sequence
  Description of Artificial Sequence: Synthetic polypeptide
EVQLLESGGGLVQPGGSLRLSCAASGFTFSTYEMYWVRQAPGKGLEWVSGIGSSGGMTMYADSVKGRFTISRDNSKNTLYLQMNSLRAEDTAMYYCAREQPGIAALQFWGQGTLVTVSSASTKGPSVFPLAPSSKS

SEQ ID NO: 810 - protein, 108 aa, Artificial Sequence
  Description of Artificial Sequence: Synthetic polypeptide
QDIQMTQSPSSLSASVGDRVTITCRASQSISIYLTWYQHRPGKAPNLLIYGAATLQTGVPSRFSGSGSGTDFTLTIRGLQPEDFATYYCQQTFSLPRTFGQGTKLEIK

SEQ ID NO: 811 - protein, 138 aa, Artificial Sequence
  Description of Artificial Sequence: Synthetic polypeptide
EVQLLESGGGLVQPGGSLRLSCAASGFTFSMYHMNWVRQAPGKGLEWVSGIVSSGGVTFYADSVKGRFTISRDNSKNTLYLQMNSLRAEDTAVYYCARITTVTTGGAFDIWGQGTMVTVSSASTKGPSVFPLAPSSKS

SEQ ID NO: 812 - protein, 108 aa, Artificial Sequence
  Description of Artificial Sequence: Synthetic polypeptide
QDIQMTQSPSSLSASVGDTVTITCRTSQTINNYLNWYQQRPGEAPKVLIYATHTLESGVPSRFSGSGSGTDFTLTIGSLQPEDFATYYCQQSFAFPYTFGQGTKVEIT

SEQ ID NO: 813 - protein, 135 aa, Artificial Sequence
  Description of Artificial Sequence: Synthetic polypeptide
EVQLLESGGGLVQPGGSLRLSCAASGFTFSWYTMGWVRQAPGKGLEWVSWIYFGGLTTYADSVKGRFTISRDNSKNTLYLQMNSLRAEDTAVYYCARLGGPLDAFDIWGQGTMVTVSSASTKGPSVFPLAPSSKS

SEQ ID NO: 814 - protein, 108 aa, Artificial Sequence
  Description of Artificial Sequence: Synthetic polypeptide
QDIQMTQSPSSLSASIGDRVTISCRASRGIGTYLNWYQQHAGKAPKLLIRAASSLETGVPPRFSGSGSGTDFTLTISSLQSDDFATYYCQESFTNVYNFGQGTKLEIK

SEQ ID NO: 815 - protein, 137 aa, Artificial Sequence
  Description of Artificial Sequence: Synthetic polypeptide
EVQLLESGGGLVQPGGSLRLSCAASGFTFSQYAMHWVRQAPGKGLEWVSSIYPSGGFTLYADSVKGRFTISRDNSKNTLYLQMNSLRAEDTAMYYCARGGWLAGGELLNWGQGTLVTVSSASTKGPSVFPLAPSSKS

SEQ ID NO: 816 - protein, 108 aa, Artificial Sequence
  Description of Artificial Sequence: Synthetic polypeptide
QDIQMTQSPSSLSASVGDRVTITCRTSQGINHYLNWYQQKPGKAPKILVFAASELQTGVPSRFSGTGSGTSYTLTITSLQPEDVATYYCQQTYTSPYTFGQGTKLEVK

SEQ ID NO: 817 - protein, 138 aa, Artificial Sequence
  Description of Artificial Sequence: Synthetic polypeptide
EVQLLESGGGLVQPGGSLRLSCAASGFTFSLYNMTWVRQAPGKGLEWVSYIYPSGGGTHYADSVKGRFTISRDNSKNTLYLQMNSLRAEDTAVYYCARDTGFWSADAFDIWGQGTMVTVSSASTKGPSVFPLAPSSKS

SEQ ID NO: 818 - protein, 108 aa, Artificial Sequence
  Description of Artificial Sequence: Synthetic polypeptide
QDIQMTQSPSSLSAFVGDRVSITCRASQTISVYVNWYQHKSGQAPKLLIYGASSLQSGVPSRFSGSGSGTDFTLTISSLQPEDFATYFCQQSYSIPFTFGGGTDVQIR

SEQ ID NO: 819 - protein, 135 aa, Artificial Sequence
  Description of Artificial Sequence: Synthetic polypeptide
EVQLLESGGGLVQPGGSLRLSCAASGFTFSQYPMNWVRQAPGKGLEWVSSISSSGGFTTYADSVKGRFTISRDNSKNTLYLQMNSLRAEDTAVYYCAREEQQGGFDYWGQGTLVTVSSASTKGPSVFPLAPSSKS

SEQ ID NO: 820 - protein, 108 aa, Artificial Sequence
  Description of Artificial Sequence: Synthetic polypeptide
QDIQMTQSPSSLSASVGDRVTITCRASQSISRYLNWYQQKPGKAPKLLIYAASTLETGVPSRFSGSGSGTDFTLTITTLQPEDFVIYYCQQSYSTPYTFGQGTKLEIK

SEQ ID NO: 821 - protein, 137 aa, Artificial Sequence
  Description of Artificial Sequence: Synthetic polypeptide
EVQLLESGGGLVQPGGSLRLSCAASGFTFSWYYMGWVRQAPGKGLEWVSWIVSSGGLTLYADSVKGRFTISRDNSKNTLYLQMNSLRAEDTAMYYCARTTVTTGDAFDIWGQGTMVTVSSASTKGPSVFPLAPSSKS

SEQ ID NO: 822 - protein, 108 aa, Artificial Sequence
  Description of Artificial Sequence: Synthetic polypeptide
QDIQMTQSPSSLSASVGDRVTITCRASQGIRNDLGWYQHKPGKAPKLLIYAASILQSGVPSRFSGTASGTDFTLTISSLQPEDFATYFCLQDYEYPLTFGGGTKLDIK

SEQ ID NO: 823 - protein, 135 aa, Artificial Sequence
  Description of Artificial Sequence: Synthetic polypeptide
EVQLLESGGGLVQPGGSLRLSCAASGFTFSLYSMYWVRQAPGKGLEWVSRIRPSGGGTVYADSVKGRFTISRDNSKNTLYLQMNSLRAEDTAVYYCARDPLYSSGDVWGQGTTVTVSSASTKGPSVFPLAPSSKS

SEQ ID NO: 824 - protein, 108 aa, Artificial Sequence
  Description of Artificial Sequence: Synthetic polypeptide
QDIQMTQSPSSLSASVGDRVTITCRASQSIGIYLNWYHQKPGKAPNLLIYGASSLQSGVPSRFSGSGSGTDFTLTISSLQPGDFATYYCQHSYSTPFTFGGGTKVEIK

SEQ ID NO: 825 - protein, 137 aa, Artificial Sequence
  Description of Artificial Sequence: Synthetic polypeptide
EVQLLESGGGLVQPGGSLRLSCAASGFTFSSYAMVWVRQAPGKGLEWVSSIGSSGGFTLYADSVKGRFTISRDNSKNTLYLQMNSLRAEDTAVYYCASMNLGGGDAFDIWGQGTMVTVSSASTKGPSVFPLAPSSKS

SEQ ID NO: 826 - protein, 110 aa, Artificial Sequence
  Description of Artificial Sequence: Synthetic polypeptide
QSALTQPPSVSVSPGQTASITCSGDKLGEKYVSWYQQKPGQSPVVVIYQDNKRPSGIPERFSGSNSGNTATLTISGTQAVDEADYYCQAWDSYTVVFGGGSKLTVLGQPK

SEQ ID NO: 827 - protein, 142 aa, Artificial Sequence
  Description of Artificial Sequence: Synthetic polypeptide
EVQLLESGGGLVQPGGSLRLSCAASGFTFSDYEMHWVRQAPGKGLEWVSGISPSGGKTQYADSVKGRFTISRDNSKNTLYLQMNSLRAEDTAVYYCARDLKWGGRGSPDWYFDLWGRGTLVTVSSASTKGPSVFPLAPSSKS

SEQ ID NO: 828 - protein, 108 aa, Artificial Sequence
  Description of Artificial Sequence: Synthetic polypeptide
QDIQMTQSPSSLSASVGDRVTITCRASQSISSYLNWYQQKPGKAPKLLIYAASSLQSGVPSRFSGSGSGTDFTLTISSLQPEDFATYYCQQSYSTPPTFGGGTKVEIK

SEQ ID NO: 829 - protein, 137 aa, Artificial Sequence
  Description of Artificial Sequence: Synthetic polypeptide
EVQLLESGGGLVQPGGSLRLSCAASGFTFSNYPMDWVRQAPGKGLEWVSSISSSGGWTNYADSVKGRFTISRDNSKNTLYLQMNSLRAEDTAVYYCATDTSGSYLGFDYWGQGTLVTVSSASTKGPSVFPLAPSSKS

SEQ ID NO: 830 - protein, 108 aa, Artificial Sequence
  Description of Artificial Sequence: Synthetic polypeptide
QDIQMTQSPSSLSASVGDRVSITCRASQSISTYLNWYQHKPGKAPTLLIYGAFSLQSGVPSRFSGSGSGTDFALTISSLQPEDFATYYCQQSHSTPPTFGQGTRVEIK

SEQ ID NO: 831 - protein, 137 aa, Artificial Sequence
  Description of Artificial Sequence: Synthetic polypeptide
EVQLLESGGGLVQPGGSLRLSCAASGFTFSQYKMLWVRQAPGKGLEWVSGIGPSGGLTAYADSVKGRFTISRDNSKNTLYLQMNSLRAEDTAVYYCARAPWFGELGMDVWGQGTTVTVSSASTKGPSVFPLAPSSKS

SEQ ID NO: 832 - protein, 108 aa, Artificial Sequence
  Description of Artificial Sequence: Synthetic polypeptide
QDIQMTQSPSSLSASVGDRVTITCRASQSISAYLNWYQQKPGKAPQLLMYGVGSLQSGVPSRFSGSGSGTDFTLTISSLQPEDFATYFCQQGYTTPVTFGGGTKVEIK

SEQ ID NO: 833 - protein, 137 aa, Artificial Sequence
  Description of Artificial Sequence: Synthetic polypeptide
EVQLLESGGGLVQPGGSLRLSCAASGFTFSWYRMDWVRQAPGKGLEWVSSIWPSGGLTSYADSVKGRFTISRDNSKNTLYLQMNSLRAEDTAVYYCARGWAPGGDAFDIWGQGTMVTVSSASTKGPSVFPLAPSSKS

SEQ ID NO: 834 - protein, 108 aa, Artificial Sequence
  Description of Artificial Sequence: Synthetic polypeptide
QDIQMTQSPSSLSASVGDRVTITCRASQSISSYLNWYQQKPGKAPKLLIYAASSLQSGVPSRFSGSGSGTDFTLTISSLQPEDFATYYCQQSYSTPYTFGQGTKLEIK

SEQ ID NO: 835 - protein, 138 aa, Artificial Sequence
  Description of Artificial Sequence: Synthetic polypeptide
EVQLLESGGGLVQPGGSLRLSCAASGFTFSDYTMWWVRQAPGKGLEWVSSISSSGGITFYADSVKGRFTISRDNSKNTLYLQMNSLRAEDTAVYYCARSADTAMGGAFDIWGQGTMVTVSSASTKGPSVFPLAPSSKS

SEQ ID NO: 836 - protein, 106 aa, Artificial Sequence
  Description of Artificial Sequence: Synthetic polypeptide
QYELTQPPAVSVSPGQTATITCSGDKLGDEYAAWYQQKPGQSPVLVIYQDRKRPSGIPERFSGSNFGNTATLTITGTQVMDEADYYCQAWGKRNVVFGGGTKLTVL

SEQ ID NO: 837 - protein, 139 aa, Artificial Sequence
  Description of Artificial Sequence: Synthetic polypeptide
EVQLLESGGGLVQPGGSLRLSCAASGFTFSWYQMMWVRQAPGKGLEWVSSISPSGGITEYADSVKGRFTISRDNSKNTLYLQMNSLRAEDTAVYYCARDRSSGWYYYGMDVWGQGTTVTVSSASTKGPSVFPLAPSSKS

SEQ ID NO: 838 - protein, 108 aa, Artificial Sequence
  Description of Artificial Sequence: Synthetic polypeptide
QDIQMTQSPSSLSASVGDRVTITCRASQSISSYLNWYQQKPGKAPKLLIYAASSLQSGVPSRFSGSGSGTDFTLTISSLQPEDFATYYCQQSYSTPRTFGQGTKVEIK

SEQ ID NO: 839 - protein, 136 aa, Artificial Sequence
  Description of Artificial Sequence: Synthetic polypeptide
EVQLLESGGGLVQPGGSLRLSCAASGFTFSSYMMHWVRQAPGKGLEWVSGIYPSGGWTDYADSVKGRFTISRDNSKNTLYLQMNSLRAEDTATYYCARLVAGLDAFDIWGQGTMVTVSSASTKGPSVFPLAPSSKS

SEQ ID NO: 840 - protein, 108 aa, Artificial Sequence; identical to SEQ ID NO: 808
  Description of Artificial Sequence: Synthetic polypeptide

SEQ ID NO: 841 - protein, 137 aa, Artificial Sequence
  Description of Artificial Sequence: Synthetic polypeptide
EVQLLESGGGLVQPGGSLRLSCAASGFTFSWYPMTWVRQAPGKGLEWVSSIGPSGGQTIYADSVKGRFTISRDNSKNTLYLQMNSLRAEDTAVYYCTTEYGDYGGGFDPWGQGTLVTVSSASTKGPSVFPLAPSSKS

SEQ ID NO: 842 - protein, 108 aa, Artificial Sequence
  Description of Artificial Sequence: Synthetic polypeptide
QDIQMTQSPSFLSASVGDRVTITCRASQGISSYLAWYQQKPGKAPKLLIYAASSLQSGVPSRFSGSGSGTDFTLTISSLQPEDFATYYCQQSYNTLRTFGPGTKVDLK

SEQ ID NO: 843 - protein, 139 aa, Artificial Sequence
  Description of Artificial Sequence: Synthetic polypeptide
EVQLLESGGGLVQPGGSLRLSCAASGFTFSSYHMMWVRQAPGKGLEWVSSIYPSGGATMYADSVKGRFTISRDNSKNTLYLQMNSLRAEDTAMYYCARDGYHYGDYTYFQHWGQGTLVTVSSASTKGPSVFPLAPSSKS

SEQ ID NO: 844 - protein, 108 aa, Artificial Sequence; identical to SEQ ID NO: 800
  Description of Artificial Sequence: Synthetic polypeptide

SEQ ID NO: 845 - protein, 136 aa, Artificial Sequence; identical to SEQ ID NO: 801
  Description of Artificial Sequence: Synthetic polypeptide

SEQ ID NO: 846 - protein, 108 aa, Artificial Sequence
  Description of Artificial Sequence: Synthetic polypeptide
QDIQMTQSPSSLSASVGDRVTITCRASQRISYYLTWYQQKPGKVPKLLIYAASSLESGVPSRFSGSGSGTDFTLTISNLQPEDFATYYCQQAFSTPFTFGGGTKVEIK

SEQ ID NO: 847 - protein, 136 aa, Artificial Sequence
  Description of Artificial Sequence: Synthetic polypeptide
EVQLLESGGGLVQPGGSLRLSCAASGFTFSAYYMVWVRQAPGKGLEWVSYISPSGGQTQYADSVKGRFTISRDNSKNTLYLQMNSLRAEDTAVYYCAREAISSSSFDYWGQGTLVTVSSASTKGPSVFPLAPSSKS

SEQ ID NO: 848 - protein, 108 aa, Artificial Sequence
  Description of Artificial Sequence: Synthetic polypeptide
QDIQMTQSPSSVSASVGDRITITCRTRQSISNYLNWYQQKPGEPPKLLIFAASSLQSGVPSRFSGSGTGTEFTLTISSLQPEDLAIYYCQQSYDIPFTFGQGTKLEIK

SEQ ID NO: 849 - protein, 136 aa, Artificial Sequence
  Description of Artificial Sequence: Synthetic polypeptide
EVQLLESGGGLVQPGGSLRLSCAASGFTFSEYDMAWVRQAPGKGLEWVSYIVSSGGFTSYADSVKGRFTISRDNSKNTLYLQMNSLRAEDTAVYYCTTWAGWIAAADYWGQGTLVTVSSASTKGPSVFPLAPSSKS

SEQ ID NO: 850 - protein, 108 aa, Artificial Sequence
  Description of Artificial Sequence: Synthetic polypeptide
QDIQMTQSPSSLSASVGDRVTITCRASQSISNYLNWYQQKPGKAPKFLIYAASSLQSGVPSRFSGSGSGTDFTLSISSLQPEDFATYYCQQSYSTPQTFGQGTKVEMK

SEQ ID NO: 851 - protein, 136 aa, Artificial Sequence
  Description of Artificial Sequence: Synthetic polypeptide
EVQLLESGGGLVQPGGSLRLSCAASGFTFSAYQMAWVRQAPGKGLEWVSVIYSSGGYTDYADSVKGRFTISRDNSKNTLYLQMNSLRAEDTAVYYCARHNWNDGAFDIWGQGTMVTVSSASTKGPSVFPLAPSSKS

SEQ ID NO: 852 - protein, 107 aa, Artificial Sequence
  Description of Artificial Sequence: Synthetic polypeptide
QDIQMTQSPSSLSASVGDRVTITCRASQSISSYLNWYQQKPGKAPKLLIYAASSLQSGVPSRFSGSGSGTDFTLTISSLQPEDFATYYCQQSYSTLTFGGGTKVEIK

SEQ ID NO: 853 - protein, 137 aa, Artificial Sequence
  Description of Artificial Sequence: Synthetic polypeptide
EVQLLESGGGLVQPGGSLRLSCAASGFTFSWYAMHWVRQAPGKGLEWVSGIYSSGGYTKYADSVKGRFTISRDNSKNTLYLQMNSLRAEDTAVYYCARDLSNGDDVFDIWGQGTMVTVSSASTKGPSVFPLAPSSKS

SEQ ID NO: 854 - protein, 108 aa, Artificial Sequence
  Description of Artificial Sequence: Synthetic polypeptide
QDIQMTQSPSSLSASVGDRVTITCRASQSINFYLNWYQQKPGKAPKLLIYVASSLESGVPSRFSGSASGTEFTLTISSLQPEDFATYYCLQSYSAPYTFGQGTKVEIT

SEQ ID NO: 855 - protein, 137 aa, Artificial Sequence
  Description of Artificial Sequence: Synthetic polypeptide
EVQLLESGGGLVQPGGSLRLSCAASGFTFSYYQMGWVRQAPGKGLEWVSSIYPSGGMTDYADSVKGRFTISRDNSKNTLYLQMNSLRAEDTAVYYCTRGSPWGDDAFDIWGQGTMVTVSSASTKGPSVFPLAPSSKS

SEQ ID NO: 856 - protein, 108 aa, Artificial Sequence
  Description of Artificial Sequence: Synthetic polypeptide
QDIQMTQSPSSLSASEGDMVTITCRTSRRIGTYLNWYQQKPGKAPKLLIYGASSLQSGVPSRFSGSGSGTDFTLTVSSLQPEDVGTYYCQQSFSSPWTFGPGTKVEIK

SEQ ID NO: 857 - protein, 137 aa, Artificial Sequence
  Description of Artificial Sequence: Synthetic polypeptide
EVQLLESGGGLVQPGGSLRLSCAASGFTFSWYPMQWVRQAPGKGLEWVSYIYPSGGGTDYADSVKGRFTISRDNSKNTLYLQMNSLRAEDTATYYCATSSGWLGDAFDIWGQGTMVTVSSASTKGPSVFPLAPSSKS

SEQ ID NO: 858 - protein, 110 aa, Artificial Sequence
  Description of Artificial Sequence: Synthetic polypeptide
QDIQMTQSPSSLSASVGDRVTITCRASQSIATYLNWYQQKPGRAPKLLIYAASSLQSGVPSRFVGGGSGSGTHFTLTISSLQPEDFATYYCQQSYSTRETFGQGTKVEIK

SEQ ID NO: 859 - protein, 137 aa, Artificial Sequence
  Description of Artificial Sequence: Synthetic polypeptide
EVQLLESGGGLVQPGGSLRLSCAASGFTFSWYTMHWVRQAPGKGLEWVSVIYPSGGPTSYADSVKGRFTISRDNSKNTLYLQMNSLRAEDTATYYCARDGSGSYLGFDYWGQGTLVTVSSASTKGPSVFPLAPSSKS

SEQ ID NO: 860 - protein, 108 aa, Artificial Sequence; identical to SEQ ID NO: 778
  Description of Artificial Sequence: Synthetic polypeptide

SEQ ID NO: 861 - protein, 135 aa, Artificial Sequence; identical to SEQ ID NO: 779
  Description of Artificial Sequence: Synthetic polypeptide

SEQ ID NO: 862 - protein, 108 aa, Artificial Sequence
  Description of Artificial Sequence: Synthetic polypeptide
QDIQMTQSPSSVSASVGDRVTINCRASQDISNWLAWYQQKPGKAPNLLIYAASSLQTGAPSRFSGSGSGTDFTLTISSLQPEDFGTYVCQQSYSLPWTFGLGTKVEVR

SEQ ID NO: 863 - protein, 141 aa, Artificial Sequence
  Description of Artificial Sequence: Synthetic polypeptide
EVQLLESGGGLVQPGGSLRLSCAASGFTFSLYDMTWVRQAPGKGLEWVSGISSSGGVTIYADSVKGRFTISRDNSKNTLYLQMNSLRAEDTAVYYCARTYYYDSSGYADAFDIWGQGTMVTVSSASTKGPSVFPLAPSSKS

SEQ ID NO: 864 - protein, 108 aa, Artificial Sequence
  Description of Artificial Sequence: Synthetic polypeptide
QDIQMTQSPSSLSASVGDRVTITCRASQSINTYLNWYQQKPGKAPKVLIHAASTLESGVPSRFSGSGSGTDFTLTISSLQPEDFATYYCQQSYSTPPTFGQGTKVEIK

SEQ ID NO: 865 - protein, 135 aa, Artificial Sequence
  Description of Artificial Sequence: Synthetic polypeptide
EVQLLESGGGLVQPGGSLRLSCAASGFTFSVYLMHWVRQAPGKGLEWVSGISPSGGYTQYADSVKGRFTISRDNSKNTLYLQMNSLRAEDTAVYYCARPGGLDAFDIWGQGTMVTVSSASTKGPSVFPLAPSSKS

SEQ ID NO: 866 - protein, 108 aa, Artificial Sequence
  Description of Artificial Sequence: Synthetic polypeptide
QDIQMTQSPSSLSASVGDRVTITCRASQSISSYLNWYQQKPGKAPKLLIYAASSLQSGVPSRFSGSGSGTDFTLTISSLQPEDFATYYCQQSYSTPLTFGGGTKVEIK

SEQ ID NO: 867 - protein, 136 aa, Artificial Sequence
  Description of Artificial Sequence: Synthetic polypeptide
EVQLLESGGGLVQPGGSLRLSCAASGFTFSRYIMWWVRQAPGKGLEWVSGIYSSGGYTQYADSVKGRFTISRDNSKNTLYLQMNSLRAEDTAMYYCARELEGLGGFDYWGQGTLVTVSSASTKGPSVFPLAPSSKS

SEQ ID NO: 868 - protein, 108 aa, Artificial Sequence
  Description of Artificial Sequence: Synthetic polypeptide
QDIQMTQSPSSVSASVGDRVTITCRASQGISSWLAWYQQKPGKAPKLLIYATSGLQSGVPSRFSGSGSGTDFTLTISSLQPEDFATYYCQQAKSFPLTFGGGTRVEIK

SEQ ID NO: 869 - protein, 139 aa, Artificial Sequence
  Description of Artificial Sequence: Synthetic polypeptide
EVQLLESGGGLVQPGGSLRLSCAASGFTFSDYTMYWVRQAPGKGLEWVSSIVPSGGHTLYADSVKGRFTISRDNSKNTLYLQMNSLRAEDTAVYYCAKDHLSSWYGGFFDYWGQGTLVTVSSASTKGPSVFPLAPSSKS

SEQ ID NO: 870 - protein, 108 aa, Artificial Sequence
  Description of Artificial Sequence: Synthetic polypeptide
QDIQMTQSPSSLSASVGDRVTITCRASQSISSYLNWYQQKPGKAPKLLIYAASSLQSGVPSRFSGSGSGTDFTLTISSLQPEDFATYYCQQSYSTRYTFGQGTKLEIK

SEQ ID NO: 871 - protein, 136 aa, Artificial Sequence
  Description of Artificial Sequence: Synthetic polypeptide
EVQLLESGGGLVQPGGSLRLSCAASGFTFSGYDMMWVRQAPGKGLEWVSVISSSGGNTAYADSVKGRFTISRDNSKNTLYLQMNSLRAEDTAVYYCARESSGLYYFDYWGQGTLVTVSSASTKGPSVFPLAPSSKS

SEQ ID NO: 872 - protein, 108 aa, Artificial Sequence
  Description of Artificial Sequence: Synthetic polypeptide
QDIQMTQSPSSLSASVGDTVSITCRASQSITIYLNWYQHKPGKAPNLLIYGASNLHSGVPSRFSGSGSGTDFTLTISSLQPEDFATYYCQQSYDTPLTFGGGTKVEIK

SEQ ID NO: 873 - protein, 136 aa, Artificial Sequence
  Description of Artificial Sequence: Synthetic polypeptide
EVQLLESGGGLVQPGGSLRLSCAASGFTFSWYPMYWVRQAPGKGLEWVSSIGSSGGPTPYADSVKGRFTISRDNSKNTLYLQMNSLRAEDTAVYYCARWADYGGSLDYWGQGTLVTVSSASTKGPSVFPLAPSSKS

SEQ ID NO: 874 - protein, 110 aa, Artificial Sequence
  Description of Artificial Sequence: Synthetic polypeptide
QSVLTQPPSVSEAPRQRVTISCSGSSSNIGNNAVSWYQQLPGKAPKLLIYYDDLLPSGVSDRFSGSKSGTSASLAISGLRSEDEADYYCAAWDDSLNGFVFGTGTKVTVL

SEQ ID NO: 875 - protein, 137 aa, Artificial Sequence
  Description of Artificial Sequence: Synthetic polypeptide
EVQLLESGGGLVQPGGSLRLSCAASGFTFSRYPMMWVRQAPGKGLEWVSVIYPSGGDTFYADSVKGRFTISRDNSKNTLYLQMNSLRAEDTAVYYCASGDDYLWEAAVYWGQGTLVTVSSASTKGPSVFPLAPSSKS

SEQ ID NO: 876 - protein, 110 aa, Artificial Sequence
  Description of Artificial Sequence: Synthetic polypeptide
QDIQMTQSPATLSASPGETVTLSCRASQNIGNDVAWYRQRPGQAPRLLIHHASTRAYGIPARLRGSGSATEFTLTITSLEPEDFAIYYCQQFYDWPAHTFALGTRLEIKR

SEQ ID NO: 877 - protein, 140 aa, Artificial Sequence
  Description of Artificial Sequence: Synthetic polypeptide
EVQLLESGGGLVQPGGSLRLSCAASGFTFSYYHMWWVRQAPGKGLEWVSGISPSGGFTFYADSVKGRFTISRDNSKNTLYLQMNSLRAEDTAVYYCARDYYYDSSGYSPLGYWGQGTLVTVSSASTKGPSVFPLAPSSKS

SEQ ID NO: 878 - protein, 108 aa, Artificial Sequence
  Description of Artificial Sequence: Synthetic polypeptide
QDIQMTQSPSSLSSSVGDSATITCRASQSISIYLNWYQQKPGKAPKILIYGASQLESGVPSRFSGSGSGTDFTLTVSGLQPEDFATYWCQQSYNVPYTFGQGTKLEIK

SEQ ID NO: 879 - protein, 136 aa, Artificial Sequence
  Description of Artificial Sequence: Synthetic polypeptide
EVQLLESGGGLVQPGGSLRLSCAASGFTFSFYKMIWVRQAPGKGLEWVSSISSSGGSTQYADSVKGRFTISRDNSKNTLYLQMNSLRAEDTAVYYCARDRVDLGYLDYWGQGTLVTVSSASTKGPSVFPLAPSSKS

SEQ ID NO: 880 - protein, 108 aa, Artificial Sequence
  Description of Artificial Sequence: Synthetic polypeptide
QDIQMTQSPSSLSASVRDRVTITCRTSQNINTYLNWYYQAPGRAPKLLIFGVSSLHRGVSSRFSGSGDGTEFTLTISSLQPEDIGTYFCQQSYSSPWTFGQGTKVEIK

SEQ ID NO: 881 - protein, 136 aa, Artificial Sequence
  Description of Artificial Sequence: Synthetic polypeptide
EVQLLESGGGLVQPGGSLRLSCAASGFTFSQYLMMWVRQAPGKGLEWVSSIYPSGGYTSYADSVKGRFTISRDNSKNTLYLQMNSLRAEDTAVYYCARVSTAVADNDYWGQGTLVTVSSASTKGPSVFPLAPSSKS

SEQ ID NO: 882 - protein, 109 aa, Artificial Sequence
  Description of Artificial Sequence: Synthetic polypeptide
QDIQMTQSPSSLSASVGDRVTITCRASQTIDNYLHWYQQKPGKAPKVLIHDASSLQSGVPPRFSGSGSGTDFTLTISSLQPEDFATYYCQQSYDTPQYTFGQGTKLEIK

SEQ ID NO: 883 - protein, 135 aa, Artificial Sequence
  Description of Artificial Sequence: Synthetic polypeptide
EVQLLESGGGLVQPGGSLRLSCAASGFTFSLYDMNWVRQAPGKGLEWVSGISPSGGQTMYADSVKGRFTISRDNSKNTLYLQMNSLRAEDTAVYYCARQPMISAFDIWGQGTMVTVSSASTKGPSVFPLAPSSKS

SEQ ID NO: 884 - protein, 109 aa, Artificial Sequence
  Description of Artificial Sequence: Synthetic polypeptide
QDIQMTQSPSSLSASVGDRVTITCRASQSISSYLNWYQQKPGKAPKLLIYAASSLQSGVPSRFSGSGSGTDFTLTISSLQPEDFATYYCQQSYSTPPWTFGQGTKVEIK

SEQ ID NO: 885 - protein, 136 aa, Artificial Sequence
  Description of Artificial Sequence: Synthetic polypeptide
EVQLLESGGGLVQPGGSLRLSCAASGFTFSLYAMWWVRQAPGKGLEWVSYISSSGGFTSYADSVKGRFTISRDNSKNTLYLQMNSLRAEDTAVYYCARYRVGVAATDYWGQGTLVTVSSASTKGPSVFPLAPSSKS

SEQ ID NO: 886 - protein, 108 aa, Artificial Sequence
  Description of Artificial Sequence: Synthetic polypeptide
QDIQMTQSPSSLSASVRDRVTITCRASQSISTYLNWYQQKPGEAPKLLVFAASSLQSGVPSRFSGSGSGTDFTLSISSLQPEDFATYYCQQSYSTPHTFGQGAKVEIK

SEQ ID NO: 887 - protein, 136 aa, Artificial Sequence
  Description of Artificial Sequence: Synthetic polypeptide
EVQLLESGGGLVQPGGSLRLSCAASGFTFSGYIMHWVRQAPGKGLEWVSWIYPSGGWTEYADSVKGRFTISRDNSKNTLYLQMNSLRAEDTAVYYCARDAPGVGAIDYWGQGTLVTVSSASTKGPSVFPLAPSSKS

SEQ ID NO: 888 - protein, 108 aa, Artificial Sequence
  Description of Artificial Sequence: Synthetic polypeptide
QDIQMTQSPSSLSASEGDRVTITCRASQDISVYLNWYQMKSGKAPKLLIYGGASLQSGVPARFSGSGYGTDFTLTITDLRPEDFATYYCQQSYSLPFTFGGGTKVEIK

SEQ ID NO: 889 - protein, 137 aa, Artificial Sequence
  Description of Artificial Sequence: Synthetic polypeptide
EVQLLESGGGLVQPGGSLRLSCAASGFTFSMYWMQWVRQAPGKGLEWVSYIYPSGGPTKYADSVKGRFTISRDNSKNTLYLQMNSLRAEDTAVYYCARPSGSYGDAFDIWGQGTMVTVSSASTKGPSVFPLAPSSKS

SEQ ID NO: 890 - protein, 108 aa, Artificial Sequence
  Description of Artificial Sequence: Synthetic polypeptide
QDIQMTQSPSTLSASVGDRVTITCRASQNISSYLNWYQQKPGKAPKLLIYAASSLQSGVPSRFSGSGSGTDFTLTISSLQPEDFATYSCQQSYSTPRTFGQGTKVEIK

SEQ ID NO: 891 - protein, 136 aa, Artificial Sequence
  Description of Artificial Sequence: Synthetic polypeptide
EVQLLESGGGLVQPGGSLRLSCAASGFTFSLYIMGWVRQAPGKGLEWVSGIYPSGGFTMYADSVKGRFTISRDNSKNTLYLQMNSLRAEDTAVYYCARESSGVAAPDYWGQGTLVTVSSASTKGPSVFPLAPSSKS

SEQ ID NO: 892 - protein, 112 aa, Artificial Sequence
  Description of Artificial Sequence: Synthetic polypeptide
QDIQMTQSPLSLPVTPGEPASISCRSSQSLLHSRGYNYLDWYLQKPGQSPQLLIYLGSNRASGVPDRFSGSGSGTDFTLKISRVEAEDVGVYYCMQALQRRTFGQGTKLEIK

SEQ ID NO: 893 - protein, 144 aa, Artificial Sequence
  Description of Artificial Sequence: Synthetic polypeptide
EVQLLESGGGLVQPGGSLRLSCAASGFTFSYYTMIWVRQAPGKGLEWVSGIRSSGGGTRYADSVKGRFTISRDNSKNTLYLQMNSLRAEDTAVYYCAKDGSRYSYGSIYYYYGMDAWGQGTTVTVSSASTKGPSVFPLAPSSKS

SEQ ID NO: 894 - protein, 17 aa, Artificial Sequence
  Description of Artificial Sequence: Synthetic peptide
GGLLLWFRELKSNYFDY

SEQ ID NO: 895 - protein, 14 aa, Artificial Sequence
  Description of Artificial Sequence: Synthetic peptide
GGLLLWFRELKSNY

SEQ ID NO: 896 - DNA, 42 bp, Artificial Sequence
  Description of Artificial Sequence: Synthetic primer
  modified_base (22)..(23): a, c, t, g, unknown or other
ggcggtctattactatggttcnnkgagctgaagtctaactac

SEQ ID NO: 897 - DNA, 42 bp, Artificial Sequence
  Description of Artificial Sequence: Synthetic primer
  modified_base (19)..(20): a, c, t, g, unknown or other
ggcggtctattactatggnnkagggagctgaagtctaactac

SEQ ID NO: 898 - DNA, 42 bp, Artificial Sequence
  Description of Artificial Sequence: Synthetic primer
  modified_base (16)..(17): a, c, t, g, unknown or other
ggcggtctattactannkttcagggagctgaagtctaactac

SEQ ID NO: 899 - DNA, 42 bp, Artificial Sequence
  Description of Artificial Sequence: Synthetic primer
  modified_base (25)..(26): a, c, t, g, unknown or other
ggcggtctattactatggttcaggnnkctgaagtctaactac

SEQ ID NO: 900 - protein, 17 aa, Artificial Sequence
  Description of Artificial Sequence: Synthetic peptide
GGLLLWFRELKSNYFDY

SEQ ID NO: 901 - protein, 17 aa, Artificial Sequence
  Description of Artificial Sequence: Synthetic peptide
GGLLLAFRELKSNYFDY

SEQ ID NO: 902 - protein, 17 aa, Artificial Sequence
  Description of Artificial Sequence: Synthetic peptide
GGLLLCFRELKSNYFDY

SEQ ID NO: 903 - protein, 17 aa, Artificial Sequence
  Description of Artificial Sequence: Synthetic peptide
GGLLLDFRELKSNYFDY

SEQ ID NO: 904 - protein, 17 aa, Artificial Sequence
  Description of Artificial Sequence: Synthetic peptide
GGLLLEFRELKSNYFDY

SEQ ID NO: 905 - protein, 17 aa, Artificial Sequence
  Description of Artificial Sequence: Synthetic peptide
GGLLLGFRELKSNYFDY

SEQ ID NO: 906 - protein, 17 aa, Artificial Sequence
  Description of Artificial Sequence: Synthetic peptide
GGLLLKFRELKSNYFDY

SEQ ID NO: 907 - protein, 17 aa, Artificial Sequence
  Description of Artificial Sequence: Synthetic peptide
GGLLLLFRELKSNYFDY

SEQ ID NO: 908 - protein, 17 aa, Artificial Sequence
  Description of Artificial Sequence: Synthetic peptide
GGLLLMFRELKSNYFDY

SEQ ID NO: 909 - protein, 17 aa, Artificial Sequence
  Description of Artificial Sequence: Synthetic peptide
GGLLLPFRELKSNYFDY

SEQ ID NO: 910 - protein, 17 aa, Artificial Sequence
  Description of Artificial Sequence: Synthetic peptide
GGLLLQFRELKSNYFDY

SEQ ID NO: 911 - protein, 17 aa, Artificial Sequence
  Description of Artificial Sequence: Synthetic peptide
GGLLLRFRELKSNYFDY

SEQ ID NO: 912 - protein, 17 aa, Artificial Sequence
  Description of Artificial Sequence: Synthetic peptide
GGLLLSFRELKSNYFDY

SEQ ID NO: 913 - protein, 17 aa, Artificial Sequence
  Description of Artificial Sequence: Synthetic peptide
GGLLLTFRELKSNYFDY

SEQ ID NO: 914 - protein, 17 aa, Artificial Sequence
  Description of Artificial Sequence: Synthetic peptide
GGLLLVFRELKSNYFDY

SEQ ID NO: 915 - protein, 17 aa, Artificial Sequence
  Description of Artificial Sequence: Synthetic peptide
GGLLLWARELKSNYFDY

SEQ ID NO: 916 - protein, 17 aa, Artificial Sequence
  Description of Artificial Sequence: Synthetic peptide
GGLLLWCRELKSNYFDY

SEQ ID NO: 917 - protein, 17 aa, Artificial Sequence
  Description of Artificial Sequence: Synthetic peptide
GGLLLWDRELKSNYFDY

SEQ ID NO: 918 - protein, 17 aa, Artificial Sequence
  Description of Artificial Sequence: Synthetic peptide
GGLLLWERELKSNYFDY

SEQ ID NO: 919 - protein, 17 aa, Artificial Sequence
  Description of Artificial Sequence: Synthetic peptide
GGLLLWGRELKSNYFDY

SEQ ID NO: 920 - protein, 17 aa, Artificial Sequence
  Description of Artificial Sequence: Synthetic peptide
GGLLLWKRELKSNYFDY

SEQ ID NO: 921 - protein, 17 aa, Artificial Sequence
  Description of Artificial Sequence: Synthetic peptide
GGLLLWLRELKSNYFDY

SEQ ID NO: 922 - protein, 17 aa, Artificial Sequence
  Description of Artificial Sequence: Synthetic peptide
GGLLLWMRELKSNYFDY

SEQ ID NO: 923 - protein, 17 aa, Artificial Sequence
  Description of Artificial Sequence: Synthetic peptide
GGLLLWNRELKSNYFDY

SEQ ID NO: 924 - protein, 17 aa, Artificial Sequence
  Description of Artificial Sequence: Synthetic peptide
GGLLLWPRELKSNYFDY

SEQ ID NO: 925 - protein, 17 aa, Artificial Sequence
  Description of Artificial Sequence: Synthetic peptide
GGLLLWQRELKSNYFDY

SEQ ID NO: 926 - protein, 17 aa, Artificial Sequence
  Description of Artificial Sequence: Synthetic peptide
GGLLLWRRELKSNYFDY

SEQ ID NO: 927 - protein, 17 aa, Artificial Sequence
  Description of Artificial Sequence: Synthetic peptide
GGLLLWSRELKSNYFDY

SEQ ID NO: 928 - protein, 17 aa, Artificial Sequence
  Description of Artificial Sequence: Synthetic peptide
GGLLLWTRELKSNYFDY

SEQ ID NO: 929 - protein, 17 aa, Artificial Sequence
  Description of Artificial Sequence: Synthetic peptide
GGLLLWWRELKSNYFDY

SEQ ID NO: 930 - protein, 17 aa, Artificial Sequence
  Description of Artificial Sequence: Synthetic peptide
GGLLLWYRELKSNYFDY

SEQ ID NO: 931 - protein, 17 aa, Artificial Sequence
  Description of Artificial Sequence: Synthetic peptide
GGLLLWFAELKSNYFDY

SEQ ID NO: 932 - protein, 17 aa, Artificial Sequence
  Description of Artificial Sequence: Synthetic peptide
GGLLLWFCELKSNYFDY

SEQ ID NO: 933 - protein, 17 aa, Artificial Sequence
  Description of Artificial Sequence: Synthetic peptide
GGLLLWFEELKSNYFDY

SEQ ID NO: 934 - protein, 17 aa, Artificial Sequence
  Description of Artificial Sequence: Synthetic peptide
GGLLLWFFELKSNYFDY

SEQ ID NO: 935 - protein, 17 aa, Artificial Sequence
  Description of Artificial Sequence: Synthetic peptide
GGLLLWFGELKSNYFDY

SEQ ID NO: 936 - protein, 17 aa, Artificial Sequence
  Description of Artificial Sequence: Synthetic peptide
GGLLLWFHELKSNYFDY

SEQ ID NO: 937 - protein, 17 aa, Artificial Sequence
  Description of Artificial Sequence: Synthetic peptide
GGLLLWFKELKSNYFDY

SEQ ID NO: 938 - protein, 17 aa, Artificial Sequence
  Description of Artificial Sequence: Synthetic peptide
GGLLLWFLELKSNYFDY

SEQ ID NO: 939 - protein, 17 aa, Artificial Sequence
  Description of Artificial Sequence: Synthetic peptide
GGLLLWFMELKSNYFDY

SEQ ID NO: 940 - protein, 17 aa, Artificial Sequence
  Description of Artificial Sequence: Synthetic peptide
GGLLLWFPELKSNYFDY

SEQ ID NO: 941 - protein, 17 aa, Artificial Sequence
  Description of Artificial Sequence: Synthetic peptide
GGLLLWFQELKSNYFDY

SEQ ID NO: 942 - protein, 17 aa, Artificial Sequence
  Description of Artificial Sequence: Synthetic peptide
GGLLLWFSELKSNYFDY

SEQ ID NO: 943 - protein, 17 aa, Artificial Sequence
  Description of Artificial Sequence: Synthetic peptide
GGLLLWFTELKSNYFDY

SEQ ID NO: 944 - protein, 17 aa, Artificial Sequence
  Description of Artificial Sequence: Synthetic peptide
GGLLLWFVELKSNYFDY

SEQ ID NO: 945 - protein, 17 aa, Artificial Sequence
  Description of Artificial Sequence: Synthetic peptide
GGLLLWFWELKSNYFDY

SEQ ID NO: 946 - protein, 17 aa, Artificial Sequence
  Description of Artificial Sequence: Synthetic peptide
GGLLLWFYELKSNYFDY

SEQ ID NO: 947 - protein, 17 aa, Artificial Sequence
  Description of Artificial Sequence: Synthetic peptide
GGLLLWFRALKSNYFDY

SEQ ID NO: 948 - protein, 17 aa, Artificial Sequence
  Description of Artificial Sequence: Synthetic peptide
GGLLLWFRCLKSNYFDY

SEQ ID NO: 949 - protein, 17 aa, Artificial Sequence
  Description of Artificial Sequence: Synthetic peptide
GGLLLWFRGLKSNYFDY

SEQ ID NO: 950 - protein, 17 aa, Artificial Sequence
  Description of Artificial Sequence: Synthetic peptide
GGLLLWFRHLKSNYFDY

SEQ ID NO: 951 - protein, 17 aa, Artificial Sequence
  Description of Artificial Sequence: Synthetic peptide
GGLLLWFRKLKSNYFDY

SEQ ID NO: 952 - protein, 17 aa, Artificial Sequence
  Description of Artificial Sequence: Synthetic peptide
GGLLLWFRLLKSNYFDY

SEQ ID NO: 953 - protein, 17 aa, Artificial Sequence
  Description of Artificial Sequence: Synthetic peptide
GGLLLWFRNLKSNYFDY

SEQ ID NO: 954 - protein, 17 aa, Artificial Sequence
  Description of Artificial Sequence: Synthetic peptide
GGLLLWFRPLKSNYFDY

SEQ ID NO: 955 - protein, 17 aa, Artificial Sequence
  Description of Artificial Sequence: Synthetic peptide
GGLLLWFRQLKSNYFDY

SEQ ID NO: 956 - protein, 17 aa, Artificial Sequence
  Description of Artificial Sequence: Synthetic peptide
GGLLLWFRRLKSNYFDY

SEQ ID NO: 957 - protein, 17 aa, Artificial Sequence
  Description of Artificial Sequence: Synthetic peptide
GGLLLWFRSLKSNYFDY

SEQ ID NO: 958 - protein, 17 aa, Artificial Sequence
  Description of Artificial Sequence: Synthetic peptide
GGLLLWFRTLKSNYFDY

SEQ ID NO: 959 - protein, 17 aa, Artificial Sequence
  Description of Artificial Sequence: Synthetic peptide
GGLLLWFRVLKSNYFDY

SEQ ID NO: 960 - protein, 17 aa, Artificial Sequence
  Description of Artificial Sequence: Synthetic peptide
GGLLLWFRWLKSNYFDY

SEQ ID NO: 961 - protein, 17 aa, Artificial Sequence
  Description of Artificial Sequence: Synthetic peptide
GGLLLWFRYLKSNYFDY

SEQ ID NO: 962 - protein, 108 aa, Artificial Sequence; identical to SEQ ID NO: 260
  Description of Artificial Sequence: Synthetic polypeptide

SEQ ID NO: 963 - protein, 143 aa, Artificial Sequence
  Description of Artificial Sequence: Synthetic polypeptide
EVQLLESGGGLVQPGGSLRLSCAASGFTFSAYSMIWVRQAPGKGLEWVSYIRPSGGRTTYADSVKGRFTISRDNSKNTLYLQMNSLRAEDTAVYYCARGGLLLAFRELKSNYFDYWGQGTLVTVSSASTKGPSVFPLAPSSKS

SEQ ID NO: 964 - protein, 108 aa, Artificial Sequence; identical to SEQ ID NO: 260
  Description of Artificial Sequence: Synthetic polypeptide

SEQ ID NO: 965 - protein, 143 aa, Artificial Sequence
  Description of Artificial Sequence: Synthetic polypeptide
EVQLLESGGGLVQPGGSLRLSCAASGFTFSAYSMIWVRQAPGKGLEWVSYIRPSGGRTTYADSVKGRFTISRDNSKNTLYLQMNSLRAEDTAVYYCARGGLLLCFRELKSNYFDYWGQGTLVTVSSASTKGPSVFPLAPSSKS

SEQ ID NO: 966 - protein, 108 aa, Artificial Sequence; identical to SEQ ID NO: 260
  Description of Artificial Sequence: Synthetic polypeptide

SEQ ID NO: 967 - protein, 143 aa, Artificial Sequence
  Description of Artificial Sequence: Synthetic polypeptide
EVQLLESGGGLVQPGGSLRLSCAASGFTFSAYSMIWVRQAPGKGLEWVSYIRPSGGRTTYADSVKGRFTISRDNSKNTLYLQMNSLRAEDTAVYYCARGGLLLDFRELKSNYFDYWGQGTLVTVSSASTKGPSVFPLAPSSKS

SEQ ID NO: 968 - protein, 108 aa, Artificial Sequence; identical to SEQ ID NO: 260
  Description of Artificial Sequence: Synthetic polypeptide

SEQ ID NO: 969 - protein, 143 aa, Artificial Sequence
  Description of Artificial Sequence: Synthetic polypeptide
EVQLLESGGGLVQPGGSLRLSCAASGFTFSAYSMIWVRQAPGKGLEWVSYIRPSGGRTTYADSVKGRFTISRDNSKNTLYLQMNSLRAEDTAVYYCARGGLLLEFRELKSNYFDYWGQGTLVTVSSASTKGPSVFPLAPSSKS

SEQ ID NO: 970 - protein, 108 aa, Artificial Sequence; identical to SEQ ID NO: 260
  Description of Artificial Sequence: Synthetic polypeptide

SEQ ID NO: 971 - protein, 143 aa, Artificial Sequence
  Description of Artificial Sequence: Synthetic polypeptide
EVQLLESGGGLVQPGGSLRLSCAASGFTFSAYSMIWVRQAPGKGLEWVSYIRPSGGRTTYADSVKGRFTISRDNSKNTLYLQMNSLRAEDTAVYYCARGGLLLGFRELKSNYFDYWGQGTLVTVSSASTKGPSVFPLAPSSKS

SEQ ID NO: 972 - protein, 108 aa, Artificial Sequence; identical to SEQ ID NO: 260
  Description of Artificial Sequence: Synthetic polypeptide

SEQ ID NO: 973 - protein, 143 aa, Artificial Sequence
  Description of Artificial Sequence: Synthetic polypeptide
EVQLLESGGGLVQPGGSLRLSCAASGFTFSAYSMIWVRQAPGKGLEWVSYIRPSGGRTTYADSVKGRFTISRDNSKNTLYLQMNSLRAEDTAVYYCARGGLLLKFRELKSNYFDYWGQGTLVTVSSASTKGPSVFPLAPSSKS

SEQ ID NO: 974 - protein, 108 aa, Artificial Sequence; identical to SEQ ID NO: 260
  Description of Artificial Sequence: Synthetic polypeptide

SEQ ID NO: 975 - protein, 143 aa, Artificial Sequence
  Description of Artificial Sequence: Synthetic polypeptide
EVQLLESGGGLVQPGGSLRLSCAASGFTFSAYSMIWVRQAPGKGLEWVSYIRPSGGRTTYADSVKGRFTISRDNSKNTLYLQMNSLRAEDTAVYYCARGGLLLLFRELKSNYFDYWGQGTLVTVSSASTKGPSVFPLAPSSKS

SEQ ID NO: 976 - protein, 108 aa, Artificial Sequence; identical to SEQ ID NO: 260
  Description of Artificial Sequence: Synthetic polypeptide

SEQ ID NO: 977 - protein, 143 aa, Artificial Sequence
  Description of Artificial Sequence: Synthetic polypeptide
EVQLLESGGGLVQPGGSLRLSCAASGFTFSAYSMIWVRQAPGKGLEWVSYIRPSGGRTTYADSVKGRFTISRDNSKNTLYLQMNSLRAEDTAVYYCARGGLLLMFRELKSNYFDYWGQGTLVTVSSASTKGPSVFPLAPSSKS

SEQ ID NO: 978 - protein, 108 aa, Artificial Sequence; identical to SEQ ID NO: 260
  Description of Artificial Sequence: Synthetic polypeptide

SEQ ID NO: 979 - protein, 143 aa, Artificial Sequence
  Description of Artificial Sequence: Synthetic polypeptide
EVQLLESGGGLVQPGGSLRLSCAASGFTFSAYSMIWVRQAPGKGLEWVSYIRPSGGRTTYADSVKGRFTISRDNSKNTLYLQMNSLRAEDTAVYYCARGGLLLPFRELKSNYFDYWGQGTLVTVSSASTKGPSVFPLAPSSKS

SEQ ID NO: 980 - protein, 108 aa, Artificial Sequence; identical to SEQ ID NO: 260
  Description of Artificial Sequence: Synthetic polypeptide

SEQ ID NO: 981 - protein, 143 aa, Artificial Sequence
  Description of Artificial Sequence: Synthetic polypeptide
EVQLLESGGGLVQPGGSLRLSCAASGFTFSAYSMIWVRQAPGKGLEWVSYIRPSGGRTTYADSVKGRFTISRDNSKNTLYLQMNSLRAEDTAVYYCARGGLLLQFRELKSNYFDYWGQGTLVTVSSASTKGPSVFPLAPSSKS

SEQ ID NO: 982 - protein, 108 aa, Artificial Sequence; identical to SEQ ID NO: 260
  Description of Artificial Sequence: Synthetic polypeptide

SEQ ID NO: 983 - protein, 143 aa, Artificial Sequence
  Description of Artificial Sequence: Synthetic polypeptide
EVQLLESGGGLVQPGGSLRLSCAASGFTFSAYSMIWVRQAPGKGLEWVSYIRPSGGRTTYADSVKGRFTISRDNSKNTLYLQMNSLRAEDTAVYYCARGGLLLRFRELKSNYFDYWGQGTLVTVSSASTKGPSVFPLAPSSKS

SEQ ID NO: 984 - protein, 108 aa, Artificial Sequence; identical to SEQ ID NO: 260
  Description of Artificial Sequence: Synthetic polypeptide

SEQ ID NO: 985 - protein, 143 aa, Artificial Sequence
  Description of Artificial Sequence: Synthetic polypeptide
EVQLLESGGGLVQPGGSLRLSCAASGFTFSAYSMIWVRQAPGKGLEWVSYIRPSGGRTTYADSVKGRFTISRDNSKNILYLQMNSLRAEDTAVYYCARGGLLLSFRELKSNYFDYWGQGTLVTVSSASTKGPSVFPLAPSSKS

SEQ ID NO: 986 - protein, 108 aa, Artificial Sequence; identical to SEQ ID NO: 260
  Description of Artificial Sequence: Synthetic polypeptide

SEQ ID NO: 987 - protein, 143 aa, Artificial Sequence
  Description of Artificial Sequence: Synthetic polypeptide
EVQLLESGGGLVQPGGSLRLSCAASGFTFSAYSMIWVRQAPGKGLEWVSYIRPSGGRTTYADSVKGRFTISRDNSKNTLYLQMNSLRAEDTAVYYCARGGLLLTFRELKSNYFDYWGQGTLVTVSSASTKGPSVFPLAPSSKS

SEQ ID NO: 988 - protein, 108 aa, Artificial Sequence; identical to SEQ ID NO: 260
  Description of Artificial Sequence: Synthetic polypeptide

SEQ ID NO: 989 - protein, 143 aa, Artificial Sequence
  Description of Artificial Sequence: Synthetic polypeptide
EVQLLESGGGLVQPGGSLRLSCAASGFTFSAYSMIWVRQAPGKGLEWVSYIRPSGGRTTYADSVKGRFTISRDNSKNTLYLQMNSLRAEDTAVYYCARGGLLLVFRELKSNYFDYWGQGTLVTVSSASTKGPSVFPLAPSSKS

SEQ ID NO: 990 - protein, 108 aa, Artificial Sequence; identical to SEQ ID NO: 260
  Description of Artificial Sequence: Synthetic polypeptide

SEQ ID NO: 991 - protein, 143 aa, Artificial Sequence; identical to SEQ ID NO: 291
  Description of Artificial Sequence: Synthetic polypeptide

SEQ ID NO: 992 - protein, 108 aa, Artificial Sequence; identical to SEQ ID NO: 260
  Description of Artificial Sequence: Synthetic polypeptide

SEQ ID NO: 993 - protein, 143 aa, Artificial Sequence
  Description of Artificial Sequence: Synthetic polypeptide
EVQLLESGGGLVQPGGSLRLSCAASGFTFSAYSMIWVRQAPGKGLEWVSYIRPSGGRTTYADSVKGRFTISRDNSKNTLYLQMNSLRAEDTAVYYCARGGLLLWCRELKSNYFDYWGQGTLVTVSSASTKGPSVFPLAPSSKS

SEQ ID NO: 994 - protein, 108 aa, Artificial Sequence; identical to SEQ ID NO: 260
  Description of Artificial Sequence: Synthetic polypeptide

SEQ ID NO: 995 - protein, 143 aa, Artificial Sequence; identical to SEQ ID NO: 285
  Description of Artificial Sequence: Synthetic polypeptide

SEQ ID NO: 996 - protein, 108 aa, Artificial Sequence; identical to SEQ ID NO: 260
  Description of Artificial Sequence: Synthetic polypeptide

SEQ ID NO: 997 - protein, 143 aa, Artificial Sequence; identical to SEQ ID NO: 293
  Description of Artificial Sequence: Synthetic polypeptide

SEQ ID NO: 998 - protein, 108 aa, Artificial Sequence; identical to SEQ ID NO: 260
  Description of Artificial Sequence: Synthetic polypeptide

SEQ ID NO: 999 - protein, 143 aa, Artificial Sequence
  Description of Artificial Sequence: Synthetic polypeptide
EVQLLESGGGLVQPGGSLRLSCAASGFTFSAYSMIWVRQAPGKGLEWVSYIRPSGGRTTYADSVKGRFTISRDNSKNTLYLQMNSLRAEDTAVYYCARGGLLLWFAELKSNYFDYWGQGTLVTVSSASTKGPSVFPLAPSSKS

SEQ ID NO: 1000 - protein, 108 aa, Artificial Sequence; identical to SEQ ID NO: 260
  Description of Artificial Sequence: Synthetic polypeptide

SEQ ID NO: 1001 - protein, 143 aa, Artificial Sequence
  Description of Artificial Sequence: Synthetic polypeptide
EVQLLESGGGLVQPGGSLRLSCAASGFTFSAYSMIWVRQAPGKGLEWVSYIRPSGGRTTYADSVKGRFTISRDNSKNTLYLQMNSLRAEDTAVYYCARGGLLLWFCELKSNYFDYWGQGTLVTVSSASTKGPSVFPLAPSSKS

SEQ ID NO: 1002 - protein, 108 aa, Artificial Sequence; identical to SEQ ID NO: 260
  Description of Artificial Sequence: Synthetic polypeptide

SEQ ID NO: 1003 - protein, 143 aa, Artificial Sequence
  Description of Artificial Sequence: Synthetic polypeptide
EVQLLESGGGLVQPGGSLRLSCAASGFTFSAYSMIWVRQAPGKGLEWVSYIRPSGGRTTYADSVKGRFTISRDNSKNTLYLQMNSLRAEDTAVYYCARGGLLLWFEELKSNYFDYWGQGTLVTVSSASTKGPSVFPLAPSSKS

SEQ ID NO: 1004 - protein, 108 aa, Artificial Sequence; identical to SEQ ID NO: 260
  Description of Artificial Sequence: Synthetic polypeptide

SEQ ID NO: 1005 - protein, 143 aa, Artificial Sequence
  Description of Artificial Sequence: Synthetic polypeptide
EVQLLESGGGLVQPGGSLRLSCAASGFTFSAYSMIWVRQAPGKGLEWVSYIRPSGGRTTYADSVKGRFTISRDNSKNTLYLQMNSLRAEDTAVYYCARGGLLLWFFELKSNYFDYWGQGTLVTVSSASTKGPSVFPLAPSSKS

SEQ ID NO: 1006 - protein, 108 aa, Artificial Sequence; identical to SEQ ID NO: 260
  Description of Artificial Sequence: Synthetic polypeptide

SEQ ID NO: 1007 - protein, 143 aa, Artificial Sequence
  Description of Artificial Sequence: Synthetic polypeptide
EVQLLESGGGLVQPGGSLRLSCAASGFTFSAYSMIWVRQAPGKGLEWVSYIRPSGGRTTYADSVKGRFTISRDNSKNTLYLQMHSLRAEDTAVYYCARGGLLLWFGELKSNYFDYWGQGTLVTVSSASTKGPSVFPLAPSSKS

SEQ ID NO: 1008 - protein, 108 aa, Artificial Sequence; identical to SEQ ID NO: 260
  Description of Artificial Sequence: Synthetic polypeptide

SEQ ID NO: 1009 - protein, 143 aa, Artificial Sequence
  Description of Artificial Sequence: Synthetic polypeptide
EVQLLESGGGLVQPGGSLRLSCAASGFTFSAYSMIWVRQAPGKGLEWVSYIRPSGGRTTYADSVKGRFTISRDNSKNTLYLQMNSLRAEDTAVYYCARGGLLLWFHELKSNYFDYWGQGTLVTVSSASTKGPSVFPLAPSSKS

SEQ ID NO: 1010 - protein, 108 aa, Artificial Sequence; identical to SEQ ID NO: 260
  Description of Artificial Sequence: Synthetic polypeptide

SEQ ID NO: 1011 - protein, 143 aa, Artificial Sequence
  Description of Artificial Sequence: Synthetic polypeptide
EVQLLESGGGLVQPGGSLRLSCAASGFTFSAYSMIWVRQAPGKGLEWVSYIRPSGGRTTYADSVKGRFTISRDNSKNTLYLQMNSLRAEDTAVYYCARGGLLLWFKELKSNYFDYWGQGTLVTVSSASTKGPSVFPLAPSSKS

SEQ ID NO: 1012 - protein, 108 aa, Artificial Sequence; identical to SEQ ID NO: 260
  Description of Artificial Sequence: Synthetic polypeptide

SEQ ID NO: 1013 - protein, 143 aa, Artificial Sequence
  Description of Artificial Sequence: Synthetic polypeptide
EVQLLESGGGLVQPGGSLRLSCAASGFTFSAYSMIWVRQAPGKGLEWVSYIRPSGGRTTYADSVKGRFTISRDNSKNTLYLQMNSLRAEDTAVYYCARGGLLLWFLELKSNYFDYWGQGTLVTVSSASTKGPSVFPLAPSSKS

SEQ ID NO: 1014 - protein, 108 aa, Artificial Sequence; identical to SEQ ID NO: 260
  Description of Artificial Sequence: Synthetic polypeptide

SEQ ID NO: 1015 - protein, 143 aa, Artificial Sequence
  Description of Artificial Sequence: Synthetic polypeptide
EVQLLESGGGLVQPGGSLRLSCAASGFTFSAYSMIWVRQAPGKGLEWVSYIRPSGGRTTYADSVKGRFTISRDNSKNTLYLQMNSLRAEDTAVYYCARGGLLLWFMELKSNYFDYWGQGTLVTVSSASTKGPSVFPLAPSSKS

SEQ ID NO: 1016 - protein, 108 aa, Artificial Sequence; identical to SEQ ID NO: 260
  Description of Artificial Sequence: Synthetic polypeptide

SEQ ID NO: 1017 - protein, 143 aa, Artificial Sequence
  Description of Artificial Sequence: Synthetic polypeptide
EVQLLESGGGLVQPGGSLRLSCAASGFTFSAYSMIWVRQAPGKGLEWVSYIRPSGGRTTYADSVKGRFTISRDNSKNTLYLQMNSLRAEDTAVYYCARGGLLLWFPELKSNYFDYWGQGTLVTVSSASTKGPSVFPLAPSSKS

SEQ ID NO: 1018 - protein, 108 aa, Artificial Sequence; identical to SEQ ID NO: 260
  Description of Artificial Sequence: Synthetic polypeptide

SEQ ID NO: 1019 - protein, 143 aa, Artificial Sequence
  Description of Artificial Sequence: Synthetic polypeptide
EVQLLESGGGLVQPGGSLRLSCAASGFTFSAYSMIWVRQAPGKGLEWVSYIRPSGGRTTYADSVKGRFTISRDNSKNTLYLQMNSLRAEDTAVYYCARGGLLLWFQELKSNYFDYWGQGTLVTVSSASTKGPSVFPLAPSSKS

SEQ ID NO: 1020 - protein, 108 aa, Artificial Sequence; identical to SEQ ID NO: 260
  Description of Artificial Sequence: Synthetic polypeptide

SEQ ID NO: 1021 - protein, 143 aa, Artificial Sequence
  Description of Artificial Sequence: Synthetic polypeptide
EVQLLESGGGLVQPGGSLRLSCAASGFTFSAYSMIWVRQAPGKGLEWVSYIRPSGGRTTYADSVKGRFTISRDNSKNTLYLQMNSLRAEDTAVYYCARGGLLLWFRALKSNYFDYWGQGTLVTVSSASTKGPSVFPLAPSSKS

SEQ ID NO: 1022 - protein, 108 aa, Artificial Sequence; identical to SEQ ID NO: 260
  Description of Artificial Sequence: Synthetic polypeptide

SEQ ID NO: 1023 - protein, 143 aa, Artificial Sequence
  Description of Artificial Sequence: Synthetic polypeptide
EVQLLESGGGLVQPGGSLRLSCAASGFTFSAYSMIWVRQAPGKGLEWVSYIRPSGGRTTYADSVKGRFTISRDNSKNTLYLQMNSLRAEDTAVYYCARGGLLLWFRCLKSNYFDYWGQGTLVTVSSASTKGPSVFPLAPSSKS

SEQ ID NO: 1024 - protein, 108 aa, Artificial Sequence; identical to SEQ ID NO: 260
  Description of Artificial Sequence: Synthetic polypeptide

SEQ ID NO: 1025 - protein, 143 aa, Artificial Sequence; identical to SEQ ID NO: 261
  Description of Artificial Sequence: Synthetic polypeptide

SEQ ID NO: 1026 - protein, 108 aa, Artificial Sequence; identical to SEQ ID NO: 260
  Description of Artificial Sequence: Synthetic polypeptide

SEQ ID NO: 1027 - protein, 143 aa, Artificial Sequence
  Description of Artificial Sequence: Synthetic polypeptide
EVQLLESGGGLVQPGGSLRLSCAASGFTFSAYSMIWVRQAPGKGLEWVSYIRPSGGRTTYADSVKGRFTISRDNSKNTLYLQMNSLRAEDTAVYYCARGGLLLWFRGLKSNYFDYWGQGTLVTVSSASTKGPSVFPLAPSSKS

SEQ ID NO: 1028 - protein, 108 aa, Artificial Sequence; identical to SEQ ID NO: 260
  Description of Artificial Sequence: Synthetic polypeptide

SEQ ID NO: 1029 - protein, 143 aa, Artificial Sequence
  Description of Artificial Sequence: Synthetic polypeptide
EVQLLESGGGLVQPGGSLRLSCAASGFTFSAYSMIWVRQAPGKGLEWVSYIRPSGGRTTYADSVKGRFTISRDNSKNTLYLQMNSLRAEDTAVYYCARGGLLLWFRHLKSNYFDYWGQGTLVTVSSASTKGPSVFPLAPSSKS

SEQ ID NO: 1030 - protein, 108 aa, Artificial Sequence; identical to SEQ ID NO: 260
  Description of Artificial Sequence: Synthetic polypeptide

SEQ ID NO: 1031 - protein, 143 aa, Artificial Sequence
  Description of Artificial Sequence: Synthetic polypeptide
EVQLLESGGGLVQPGGSLRLSCAASGFTFSAYSMIWVRQAPGKGLEWVSYIRPSGGRTTYADSVKGRFTISRDNSKNTLYLQMNSLRAEDTAVYYCARGGLLLWFRKLKSNYFDYWGQGTLVTVSSASTKGPSVFPLAPSSKS

SEQ ID NO: 1032 - protein, 108 aa, Artificial Sequence; identical to SEQ ID NO: 260
  Description of Artificial Sequence: Synthetic polypeptide

SEQ ID NO: 1033 - protein, 143 aa, Artificial Sequence
  Description of Artificial Sequence: Synthetic polypeptide
EVQLLESGGGLVQPGGSLRLSCAASGFTFSAYSMIWVRQAPGKGLEWVSYIRPSGGRTTYADSVKGRFTISRDNSKNTLYLQMNSLRAEDTAVYYCARGGLLLWFRLLKSNYFDYWGQGTLVTVSSASTKGPSVFPLAPSSKS

SEQ ID NO: 1034 - protein, 108 aa, Artificial Sequence; identical to SEQ ID NO: 260
  Description of Artificial Sequence: Synthetic polypeptide

SEQ ID NO: 1035 - protein, 143 aa, Artificial Sequence
  Description of Artificial Sequence: Synthetic polypeptide
EVQLLESGGGLVQPGGSLRLSCAASGFTFSAYSMIWVRQAPGKGLEWVSYIRPSGGRTTYADSVKGRFTISRDNSKNTLYLQMNSLRAEDTAVYYCARGGLLLWFRNLKSNYFDYWGQGTLVTVSSASTKGPSVFPLAPSSKS

SEQ ID NO: 1036 - protein, 108 aa, Artificial Sequence; identical to SEQ ID NO: 260
  Description of Artificial Sequence: Synthetic polypeptide

SEQ ID NO: 1037 - protein, 143 aa, Artificial Sequence
  Description of Artificial Sequence: Synthetic polypeptide
EVQLLESGGGLVQPGGSLRLSCAASGFTFSAYSMIWVRQAPGKGLEWVSYIRPSGGRTTYADSVKGRFTISRDNSKNTLYLQMNSLRAEDTAVYYCARGGLLLWFRPLKSNYFDYWGQGTLVTVSSASTKGPSVFPLAPSSKS

SEQ ID NO: 1038 - protein, 108 aa, Artificial Sequence; identical to SEQ ID NO: 260
  Description of Artificial Sequence: Synthetic polypeptide

SEQ ID NO: 1039 - protein, 143 aa, Artificial Sequence
  Description of Artificial Sequence: Synthetic polypeptide
EVQLLESGGGLVQPGGSLRLSCAASGFTFSAYSMIWVRQAPGKGLEWVSYIRPSGGRTTYADSVKGRFTISRDNSKNTLYLQMNSLRAEDTAVYYCARGGLLLWFRQLKSNYFDYWGQGTLVTVSSASTKGPSVFPLAPSSKS

SEQ ID NO: 1040 - protein, 108 aa, Artificial Sequence; identical to SEQ ID NO: 260
  Description of Artificial Sequence: Synthetic polypeptide

SEQ ID NO: 1041 - protein, 143 aa, Artificial Sequence
  Description of Artificial Sequence: Synthetic polypeptide
EVQLLESGGGLVQPGGSLRLSCAASGFTFSAYSMIWVRQAPGKGLEWVSYIRPSGGRTTYADSVKGRFTISRDNSKNTLYLQMNSLRAEDTAVYYCARGGLLLWFRRLKSNYFDYWGQGTLVTVSSASTKGPSVFPLAPSSKS

SEQ ID NO: 1042 - protein, 108 aa, Artificial Sequence; identical to SEQ ID NO: 260
  Description of Artificial Sequence: Synthetic polypeptide

SEQ ID NO: 1043 - protein, 143 aa, Artificial Sequence
  Description of Artificial Sequence: Synthetic polypeptide
EVQLLESGGGLVQPGGSLRLSCAASGFTFSAYSMIWVRQAPGKGLEWVSYIRPSGGRTTYADSVKGRFTISRDNSKNTLYLQMNSLRAEDTAVYYCARGGLLLWFRSLKSNYFDYWGQGTLVTVSSASTKGPSVFPLAPSSKS

SEQ ID NO: 1044 - protein, 108 aa, Artificial Sequence; identical to SEQ ID NO: 260
  Description of Artificial Sequence: Synthetic polypeptide

SEQ ID NO: 1045 - protein, 143 aa, Artificial Sequence
  Description of Artificial Sequence: Synthetic polypeptide
EVQLLESGGGLVQPGGSLRLSCAASGFTFSAYSMIWVRQAPGKGLEWVSYIRPSGGRTTYADSVKGRFTISRDNSKNTLYLQMNSLRAEDTAVYYCARGGLLLWFRTLKSNYFDYWGQGTLVTVSSASTKGPSVFPLAPSSKS

SEQ ID NO: 1046 - protein, 108 aa, Artificial Sequence; identical to SEQ ID NO: 260
  Description of Artificial Sequence: Synthetic polypeptide

SEQ ID NO: 1047 - protein, 143 aa, Artificial Sequence
  Description of Artificial Sequence: Synthetic polypeptide
EVQLLESGGGLVQPGGSLRLSCAASGFTFSAYSMIWVRQAPGKGLEWVSYIRPSGGRTTYADSVKGRFTISRDNSKNTLYLQMNSLRAEDTAVYYCARGGLLLWFRVLKSNYFDYWGQGTLVTVSSASTKGPSVFPLAPSSKS

SEQ ID NO: 1048 - protein, 108 aa, Artificial Sequence; identical to SEQ ID NO: 260
  Description of Artificial Sequence: Synthetic polypeptide

SEQ ID NO: 1049 - protein, 143 aa, Artificial Sequence
  Description of Artificial Sequence: Synthetic polypeptide
EVQLLESGGGLVQPGGSLRLSCAASGFTFSAYSMIWVRQAPGKGLEWVSYIRPSGGRTTYADSVKGRFTISRDNSKNTLYLQMNSLRAEDTAVYYCARGGLLLWFRWLKSNYFDYWGQGTLVTVSSASTKGPSVFPLAPSSKS

SEQ ID NO: 1050 - protein, 108 aa, Artificial Sequence; identical to SEQ ID NO: 260
  Description of Artificial Sequence: Synthetic polypeptide

SEQ ID NO: 1051 - protein, 143 aa, Artificial Sequence
  Description of Artificial Sequence: Synthetic polypeptide
EVQLLESGGGLVQPGGSLRLSCAASGFTFSAYSMIWVRQAPGKGLEWVSYIRPSGGRTTYADSVKGRFTISRDNSKNTLYLQMNSLRAEDTAVYYCARGGLLLWFRYLKSNYFDYWGQGTLVTVSSASTKGPSVFPLAPSSKS

SEQ ID NO: 1052 - protein, 108 aa, Artificial Sequence; identical to SEQ ID NO: 260
  Description of Artificial Sequence: Synthetic polypeptide

SEQ ID NO: 1053 - protein, 143 aa, Artificial Sequence
  Description of Artificial Sequence: Synthetic polypeptide
EVQLLESGGGLVQPGGSLRLSCAASGFTFSAYSMIWVRQAPGKGLEWVSYIRPSGGRTTYADSVKGRFTISRDNSKNTLYLQMNSLRAEDTAVYYCARGGLLLWFSELKSNYFDYWGQGTLVTVSSASTKGPSVFPLAPSSKS

SEQ ID NO: 1054 - protein, 108 aa, Artificial Sequence; identical to SEQ ID NO: 260
  Description of Artificial Sequence: Synthetic polypeptide

SEQ ID NO: 1055 - protein, 143 aa, Artificial Sequence
  Description of Artificial Sequence: Synthetic polypeptide
EVQLLESGGGLVQPGGSLRLSCAASGFTFSAYSMIWVRQAPGKGLEWVSYIRPSGGRTTYADSVKGRFTISRDNSKNTLYLQMNSLRAEDTAVYYCARGGLLLWFTELKSNYFDYWGQGTLVTVSSASTKGPSVFPLAPSSKS

SEQ ID NO: 1056 - protein, 108 aa, Artificial Sequence; identical to SEQ ID NO: 260
  Description of Artificial Sequence: Synthetic polypeptide

SEQ ID NO: 1057 - protein, 143 aa, Artificial Sequence
  Description of Artificial Sequence: Synthetic polypeptide
EVQLLESGGGLVQPGGSLRLSCAASGFTFSAYSMIWVRQAPGKGLEWVSYIRPSGGRTTYADSVKGRFTISRDNSKNTLYLQMNSLRAEDTAVYYCARGGLLLWFVELKSNYFDYWGQGTLVTVSSASTKGPSVFPLAPSSKS

SEQ ID NO: 1058 - protein, 108 aa, Artificial Sequence; identical to SEQ ID NO: 260
  Description of Artificial Sequence: Synthetic polypeptide

SEQ ID NO: 1059 - protein, 143 aa, Artificial Sequence
  Description of Artificial Sequence: Synthetic polypeptide
EVQLLESGGGLVQPGGSLRLSCAASGFTFSAYSMIWVRQAPGKGLEWVSYIRPSGGRTTYADSVKGRFTISRDNSKNTLYLQMNSLRAEDTAVYYCARGGLLLWFWELKSNYFDYWGQGTLVTVSSASTKGPSVFPLAPSSKS

SEQ ID NO: 1060 - protein, 108 aa, Artificial Sequence; identical to SEQ ID NO: 260
  Description of Artificial Sequence: Synthetic polypeptide

SEQ ID NO: 1061 - protein, 143 aa, Artificial Sequence
  Description of Artificial Sequence: Synthetic polypeptide
EVQLLESGGGLVQPGGSLRLSCAASGFTFSAYSMIWVRQAPGKGLEWVSYIRPSGGRTTYADSVKGRFTISRDNSKNTLYLQMNSLRAEDTAVYYCARGGLLLWFYELKSNYFDYWGQGTLVTVSSASTKGPSVFPLAPSSKS

SEQ ID NO: 1062 - protein, 108 aa, Artificial Sequence; identical to SEQ ID NO: 260
  Description of Artificial Sequence: Synthetic polypeptide

SEQ ID NO: 1063 - protein, 143 aa, Artificial Sequence; identical to SEQ ID NO: 281
  Description of Artificial Sequence: Synthetic polypeptide

SEQ ID NO: 1064 - protein, 108 aa, Artificial Sequence; identical to SEQ ID NO: 260
  Description of Artificial Sequence: Synthetic polypeptide

SEQ ID NO: 1065 - protein, 143 aa, Artificial Sequence
  Description of Artificial Sequence: Synthetic polypeptide
EVQLLESGGGLVQPGGSLRLSCAASGFTFSAYSMIWVRQAPGKGLEWVSYIRPSGGRTTYADSVKGRFTISRDNSKNTLYLQMNSLRAEDTAVYYCARGGLLLWKRELKSNYFDYWGQGTLVTVSSASTKGPSVFPLAPSSKS

SEQ ID NO: 1066 - protein, 108 aa, Artificial Sequence; identical to SEQ ID NO: 260
  Description of Artificial Sequence: Synthetic polypeptide

SEQ ID NO: 1067 - protein, 143 aa, Artificial Sequence
  Description of Artificial Sequence: Synthetic polypeptide
EVQLLESGGGLVQPGGSLRLSCAASGFTFSAYSMIWVRQAPGKGLEWVSYIRPSGGRTTYADSVKGRFTISRDNSKNTLYLQMNSLRAEDTAVYYCARGGLLLWLRELKSNYFDYWGQGTLVTVSSASTKGPSVFPLAPSSKS

SEQ ID NO: 1068 - protein, 108 aa, Artificial Sequence; identical to SEQ ID NO: 260
  Description of Artificial Sequence: Synthetic polypeptide

SEQ ID NO: 1069 - protein, 143 aa, Artificial Sequence; identical to SEQ ID NO: 279
  Description of Artificial Sequence: Synthetic polypeptide

SEQ ID NO: 1070 - protein, 108 aa, Artificial Sequence; identical to SEQ ID NO: 260
  Description of Artificial Sequence: Synthetic polypeptide

SEQ ID NO: 1071 - protein, 143 aa, Artificial Sequence; identical to SEQ ID NO: 283
  Description of Artificial Sequence: Synthetic polypeptide

SEQ ID NO: 1072 - protein, 108 aa, Artificial Sequence; identical to SEQ ID NO: 260
  Description of Artificial Sequence: Synthetic polypeptide

SEQ ID NO: 1073 - protein, 143 aa, Artificial Sequence
  Description of Artificial Sequence: Synthetic polypeptide
EVQLLESGGGLVQPGGSLRLSCAASGFTFSAYSMIWVRQAPGKGLEWVSYIRPSGGRTTYADSVKGRFTISRDNSKNTLYLQMNSLRAEDTAVYYCARGGLLLWPRELKSNYFDYWGQGTLVTVSSASTKGPSVFPLAPSSKS

SEQ ID NO: 1074 - protein, 108 aa, Artificial Sequence; identical to SEQ ID NO: 260
  Description of Artificial Sequence: Synthetic polypeptide

SEQ ID NO: 1075 - protein, 143 aa, Artificial Sequence; identical to SEQ ID NO: 287
  Description of Artificial Sequence: Synthetic polypeptide

SEQ ID NO: 1076 - protein, 108 aa, Artificial Sequence; identical to SEQ ID NO: 260
  Description of Artificial Sequence: Synthetic polypeptide

SEQ ID NO: 1077 - protein, 143 aa, Artificial Sequence
  Description of Artificial Sequence: Synthetic polypeptide
EVQLLESGGGLVQPGGSLRLSCAASGFTFSAYSMIWVRQAPGKGLEWVSYIRPSGGRTTYADSVKGRFTISRDNSKNTLYLQMNSLRAEDTAVYYCARGGLLLWRRELKSNYFDYWGQGTLVTVSSASTKGPSVFPLAPSSKS

SEQ ID NO: 1078 - protein, 108 aa, Artificial Sequence; identical to SEQ ID NO: 260
  Description of Artificial Sequence: Synthetic polypeptide

SEQ ID NO: 1079 - protein, 143 aa, Artificial Sequence; identical to SEQ ID NO: 277
  Description of Artificial Sequence: Synthetic polypeptide

SEQ ID NO: 1080 - protein, 108 aa, Artificial Sequence; identical to SEQ ID NO: 260
  Description of Artificial Sequence: Synthetic polypeptide

SEQ ID NO: 1081 - protein, 143 aa, Artificial Sequence; identical to SEQ ID NO: 289
  Description of Artificial Sequence: Synthetic polypeptide

SEQ ID NO: 1082 - protein, 108 aa, Artificial Sequence; identical to SEQ ID NO: 260
  Description of Artificial Sequence: Synthetic polypeptide

SEQ ID NO: 1083 - protein, 143 aa, Artificial Sequence
  Description of Artificial Sequence: Synthetic polypeptide
EVQLLESGGGLVQPGGSLRLSCAASGFTFSAYSMIWVRQAPGKGLEWVSYIRPSGGRTTYADSVKGRFTISRDNSKNTLYLQMNSLRAEDTAVYYCARGGLLLWWRELKSNYFDYWGQGTLVTVSSASTKGPSVFPLAPSSKS

SEQ ID NO: 1084 - protein, 108 aa, Artificial Sequence; identical to SEQ ID NO: 260
  Description of Artificial Sequence: Synthetic polypeptide

SEQ ID NO: 1085 - protein, 143 aa, Artificial Sequence
  Description of Artificial Sequence: Synthetic polypeptide
EVQLLESGGGLVQPGGSLRLSCAASGFTFSAYSMIWVRQAPGKGLEWVSYIRPSGGRTTYADSVKGRFTISRDNSKNTLYLQMNSLRAEDTAVYYCARGGLLLWYRELKSNYFDYWGQGTLVTVSSASTKGPSVFPLAPSSKS

SEQ ID NO: 1086 - protein, 11 aa, Artificial Sequence
  Description of Artificial Sequence: Synthetic peptide
RASQPIDNYLN

SEQ ID NO: 1087 - protein, 7 aa, Artificial Sequence
  Description of Artificial Sequence: Synthetic peptide
AASRLQS

SEQ ID NO: 1088 - protein, 9 aa, Artificial Sequence
  Description of Artificial Sequence: Synthetic peptide
QQSYTVPYT

SEQ ID NO: 1089 - protein, 5 aa, Artificial Sequence
  Description of Artificial Sequence: Synthetic peptide
AYSMI

SEQ ID NO: 1090 - protein, 17 aa, Artificial Sequence
  Description of Artificial Sequence: Synthetic peptide
YIRPSGGRTTYADSVKG

SEQ ID NO: 1091 - protein, 17 aa, Artificial Sequence
  Description of Artificial Sequence: Synthetic peptide
GGLLLWNRELKSNYFDY

SEQ ID NO: 1092 - protein, 11 aa, Artificial Sequence
  Description of Artificial Sequence: Synthetic peptide
RASQPIDNYLN

SEQ ID NO: 1093 - protein, 7 aa, Artificial Sequence
  Description of Artificial Sequence: Synthetic peptide
AASRLQS

SEQ ID NO: 1094 - protein, 9 aa, Artificial Sequence
  Description of Artificial Sequence: Synthetic peptide
QQSYTVPYT

SEQ ID NO: 1095 - protein, 5 aa, Artificial Sequence
  Description of Artificial Sequence: Synthetic peptide
AYSMI

SEQ ID NO: 1096 - protein, 17 aa, Artificial Sequence
  Description of Artificial Sequence: Synthetic peptide
YIRPSGGRTTYADSVKG

SEQ ID NO: 1097 - protein, 17 aa, Artificial Sequence
  Description of Artificial Sequence: Synthetic peptide
GGLLLWARELKSNYFDY

SEQ ID NO: 1098 - protein, 11 aa, Artificial Sequence
  Description of Artificial Sequence: Synthetic peptide
RAGRSISTYVN

SEQ ID NO: 1099 - protein, 7 aa, Artificial Sequence
  Description of Artificial Sequence: Synthetic peptide
AASSLQS

SEQ ID NO: 1100 - protein, 9 aa, Artificial Sequence
  Description of Artificial Sequence: Synthetic peptide
QQSQSTPYT

SEQ ID NO: 1101 - protein, 5 aa, Artificial Sequence
  Description of Artificial Sequence: Synthetic peptide
HYLMT

SEQ ID NO: 1102 - protein, 17 aa, Artificial Sequence
  Description of Artificial Sequence: Synthetic peptide
YISPSGGHTIYADSVKG

SEQ ID NO: 1103 - protein, 16 aa, Artificial Sequence
  Description of Artificial Sequence: Synthetic peptide
VARGIAARSRTSYFDY

SEQ ID NO: 1104 - protein, 12 aa, Artificial Sequence
  Description of Artificial Sequence: Synthetic peptide
RASQIVSSRYLA

SEQ ID NO: 1105 - protein, 7 aa, Artificial Sequence
  Description of Artificial Sequence: Synthetic peptide
GAASRAT

SEQ ID NO: 1106 - protein, 9 aa, Artificial Sequence
  Description of Artificial Sequence: Synthetic peptide
QQTYSSPFT

SEQ ID NO: 1107 - protein, 5 aa, Artificial Sequence
  Description of Artificial Sequence: Synthetic peptide
HYLMT

SEQ ID NO: 1108 - protein, 17 aa, Artificial Sequence
  Description of Artificial Sequence: Synthetic peptide
YISPSGGHTIYADSVKG

SEQ ID NO: 1109 - protein, 16 aa, Artificial Sequence
  Description of Artificial Sequence: Synthetic peptide
VARGIAARSRTSYFDY

SEQ ID NO: 1110 - protein, 11 aa, Artificial Sequence
  Description of Artificial Sequence: Synthetic peptide
RASQSISNYLN

SEQ ID NO: 1111 - protein, 7 aa, Artificial Sequence
  Description of Artificial Sequence: Synthetic peptide
AASSLQS

SEQ ID NO: 1112 - protein, 9 aa, Artificial Sequence
  Description of Artificial Sequence: Synthetic peptide
QQSYTSPYT

SEQ ID NO: 1113 - protein, 5 aa, Artificial Sequence
  Description of Artificial Sequence: Synthetic peptide
HYLMT

SEQ ID NO: 1114 - protein, 17 aa, Artificial Sequence
  Description of Artificial Sequence: Synthetic peptide
YISPSGGHTIYADSVKG

SEQ ID NO: 1115 - protein, 16 aa, Artificial Sequence
  Description of Artificial Sequence: Synthetic peptide
VARGIAARSRTSYFDY

SEQ ID NO: 1116 - protein, 12 aa, Artificial Sequence
  Description of Artificial Sequence: Synthetic peptide
RASQIVSSNYLA

SEQ ID NO: 1117 - protein, 7 aa, Artificial Sequence
  Description of Artificial Sequence: Synthetic peptide
GASNRAT

SEQ ID NO: 1118 - protein, 9 aa, Artificial Sequence
  Description of Artificial Sequence: Synthetic peptide
QQSFNIPYT

SEQ ID NO: 1119 - protein, 5 aa, Artificial Sequence
  Description of Artificial Sequence: Synthetic peptide
HYLMT

SEQ ID NO: 1120 - protein, 17 aa, Artificial Sequence
  Description of Artificial Sequence: Synthetic peptide
YISPSGGHTIYADSVKG

SEQ ID NO: 1121 - protein, 16 aa, Artificial Sequence
  Description of Artificial Sequence: Synthetic peptide
VARGIAARSRTSYFDY

SEQ ID NO: 1122 - protein, 12 aa, Artificial Sequence
  Description of Artificial Sequence: Synthetic peptide
RTSQFVNSNYLA

SEQ ID NO: 1123 - protein, 7 aa, Artificial Sequence
  Description of Artificial Sequence: Synthetic peptide
GASSRAT

SEQ ID NO: 1124 - protein, 9 aa, Artificial Sequence
  Description of Artificial Sequence: Synthetic peptide
QQSSRTPWT

SEQ ID NO: 1125 - protein, 5 aa, Artificial Sequence
  Description of Artificial Sequence: Synthetic peptide
HYLMT

SEQ ID NO: 1126 - protein, 17 aa, Artificial Sequence
  Description of Artificial Sequence: Synthetic peptide
YISPSGGHTIYADSVKG

SEQ ID NO: 1127 - protein, 16 aa, Artificial Sequence
  Description of Artificial Sequence: Synthetic peptide
VARGIAARSRTSYFDY

SEQ ID NO: 1128 - protein, 12 aa, Artificial Sequence
  Description of Artificial Sequence: Synthetic peptide
RTSQFVNSNYLA

SEQ ID NO: 1129 - protein, 7 aa, Artificial Sequence
  Description of Artificial Sequence: Synthetic peptide
GASSRAT

SEQ ID NO: 1130 - protein, 9 aa, Artificial Sequence
  Description of Artificial Sequence: Synthetic peptide
QQSSRTPWT

SEQ ID NO: 1131 - protein, 5 aa, Artificial Sequence
  Description of Artificial Sequence: Synthetic peptide
HYLMT

SEQ ID NO: 1132 - protein, 17 aa, Artificial Sequence
  Description of Artificial Sequence: Synthetic peptide
YISPSGGHTIYADSVKG

SEQ ID NO: 1133 - protein, 16 aa, Artificial Sequence
  Description of Artificial Sequence: Synthetic peptide
VARGIAARSRTSYFDY

SEQ ID NO: 1134 - protein, 108 aa, Artificial Sequence
  Description of Artificial Sequence: Synthetic polypeptide
QDIQMTQSPSSLSASVGDRVTVTCRAGRSISTYVNWYQQKPGKAPKLLIYAASSLQSGVPSRFSGSRSGTDFTLTISSLQPEDFATYYCQQSQSTPYTFGQGTKLEVK

SEQ ID NO: 1135 - protein, 142 aa, Artificial Sequence; identical to SEQ ID NO: 271
  Description of Artificial Sequence: Synthetic polypeptide

SEQ ID NO: 1136 - protein, 109 aa, Artificial Sequence
  Description of Artificial Sequence: Synthetic polypeptide
QDIQMTQSPGTLSLSPGERATLSCRASQIVSSRYLAWYQQRPGQAPRLLIYGAASRATGIPDRFSGSGSGTDFTLTISSLQAEDFATYYCQQTYSSPFTFGQGTKMEIK

SEQ ID NO: 1137 - protein, 142 aa, Artificial Sequence; identical to SEQ ID NO: 271
  Description of Artificial Sequence: Synthetic polypeptide

SEQ ID NO: 1138 - protein, 109 aa, Artificial Sequence
  Description of Artificial Sequence: Synthetic polypeptide
QDIQMTQSPGTLSLSPGERATLSCRTSQFVNSNYLAWYQQTPGQAPRLLIYGASSRATGIPDRFSGTGYGTDFTLTISRLEPEDYGTYYCQQSSRTPWTFGQGTRVEIK

SEQ ID NO: 1139 - protein, 142 aa, Artificial Sequence; identical to SEQ ID NO: 271
  Description of Artificial Sequence: Synthetic polypeptide

SEQ ID NO: 1140 - protein, 110 aa, Artificial Sequence
  Description of Artificial Sequence: Synthetic polypeptide
QDIQMTQSPDSLSASVGDRVTITCRASQSISNYLNWYQQKPGKAPKLLIYAASSLQSGVPSRFSGSGSGTDFTLTISGLQPEDFASYYCQQSYTSPYTFVQGTKLEIKRT

SEQ ID NO: 1141 - protein, 142 aa, Artificial Sequence; identical to SEQ ID NO: 271
  Description of Artificial Sequence: Synthetic polypeptide

SEQ ID NO: 1142 - protein, 109 aa, Artificial Sequence
  Description of Artificial Sequence: Synthetic polypeptide
QDIQMTQSPATLSLSPGERATLSCRASQIVSSNYLAWYQQKPGQAPRLLIYGASNRATGIPDRFSGSGSGTEFTLTISSLQSEDFAIYYCQQSFNIPYTFGQGTRVDIK

SEQ ID NO: 1143 - protein, 142 aa, Artificial Sequence; identical to SEQ ID NO: 271
  Description of Artificial Sequence: Synthetic polypeptide

SEQ ID NO: 1144 - protein, 11 aa, Artificial Sequence
  Description of Artificial Sequence: Synthetic peptide
RASQSISSWLA

SEQ ID NO: 1145 - protein, 7 aa, Artificial Sequence
  Description of Artificial Sequence: Synthetic peptide
KASTLES

SEQ ID NO: 1146 - protein, 8 aa, Artificial Sequence
  Description of Artificial Sequence: Synthetic peptide
QQYNTYWT

SEQ ID NO: 1147 - protein, 5 aa, Artificial Sequence
  Description of Artificial Sequence: Synthetic peptide
HYIMM

SEQ ID NO: 1148 - protein, 17 aa, Artificial Sequence
  Description of Artificial Sequence: Synthetic peptide
GIYSSGGITVYADSVKG

SEQ ID NO: 1149 - protein, 13 aa, Artificial Sequence
  Description of Artificial Sequence: Synthetic peptide
QRTGVPRRDSFNI

SEQ ID NO: 1150 - protein, 11 aa, Artificial Sequence
  Description of Artificial Sequence: Synthetic peptide
RASQSISSWLA

SEQ ID NO: 1151 - protein, 7 aa, Artificial Sequence
  Description of Artificial Sequence: Synthetic peptide
KASTLES

SEQ ID NO: 1152 - protein, 8 aa, Artificial Sequence
  Description of Artificial Sequence: Synthetic peptide
QQYNTYWT

SEQ ID NO: 1153 - protein, 5 aa, Artificial Sequence
  Description of Artificial Sequence: Synthetic peptide
IYSMH

SEQ ID NO: 1154 - protein, 17 aa, Artificial Sequence
  Description of Artificial Sequence: Synthetic peptide
SIYPSRGMTWYADSVKG

SEQ ID NO: 1155 - protein, 13 aa, Artificial Sequence
  Description of Artificial Sequence: Synthetic peptide
RRTGIPRRDAFDI

SEQ ID NO: 1156 - protein, 11 aa, Artificial Sequence
  Description of Artificial Sequence: Synthetic peptide
RASQSISSWLA

SEQ ID NO: 1157 - protein, 7 aa, Artificial Sequence
  Description of Artificial Sequence: Synthetic peptide
KASTLES

SEQ ID NO: 1158 - protein, 8 aa, Artificial Sequence
  Description of Artificial Sequence: Synthetic peptide
QQYNTYWT

SEQ ID NO: 1159 - protein, 5 aa, Artificial Sequence
  Description of Artificial Sequence: Synthetic peptide
VYNMH

SEQ ID NO: 1160 - protein, 17 aa, Artificial Sequence
  Description of Artificial Sequence: Synthetic peptide
SIYPSGGMTYYADSVKG

SEQ ID NO: 1161 - protein, 13 aa, Artificial Sequence
  Description of Artificial Sequence: Synthetic peptide
RRTGIPRRDAFDI

SEQ ID NO: 1162 - protein, 11 aa, Artificial Sequence
  Description of Artificial Sequence: Synthetic peptide
RASQSISSWLA

SEQ ID NO: 1163 - protein, 7 aa, Artificial Sequence
  Description of Artificial Sequence: Synthetic peptide
KASTLES

SEQ ID NO: 1164 - protein, 8 aa, Artificial Sequence
  Description of Artificial Sequence: Synthetic peptide
QQYNTYWT

SEQ ID NO: 1165 - protein, 5 aa, Artificial Sequence
  Description of Artificial Sequence: Synthetic peptide
HYIMM

SEQ ID NO: 1166 - protein, 17 aa, Artificial Sequence
  Description of Artificial Sequence: Synthetic peptide
GIYSSGGITVYADSVKG

SEQ ID NO: 1167 - protein, 13 aa, Artificial Sequence
  Description of Artificial Sequence: Synthetic peptide
RRIGVPRRDEFDI

SEQ ID NO: 1168 - protein, 11 aa, Artificial Sequence
  Description of Artificial Sequence: Synthetic peptide
RASQSISSWLA

SEQ ID NO: 1169 - protein, 7 aa, Artificial Sequence
  Description of Artificial Sequence: Synthetic peptide
KASTLES

SEQ ID NO: 1170 - protein, 8 aa, Artificial Sequence
  Description of Artificial Sequence: Synthetic peptide
QQYNTYWT

SEQ ID NO: 1171 - protein, 5 aa, Artificial Sequence
  Description of Artificial Sequence: Synthetic peptide
HYIMM

SEQ ID NO: 1172 - protein, 17 aa, Artificial Sequence
  Description of Artificial Sequence: Synthetic peptide
GIYSSGGITVYADSVKG

SEQ ID NO: 1173 - protein, 13 aa, Artificial Sequence
  Description of Artificial Sequence: Synthetic peptide
RRTGVPRWDDFDI

SEQ ID NO: 1174 - protein, 11 aa, Artificial Sequence
  Description of Artificial Sequence: Synthetic peptide
RASQSISSWLA

SEQ ID NO: 1175 - protein, 7 aa, Artificial Sequence
  Description of Artificial Sequence: Synthetic peptide
KASTLES

SEQ ID NO: 1176 - protein, 8 aa, Artificial Sequence
  Description of Artificial Sequence: Synthetic peptide
QQYNTYWT

SEQ ID NO: 1177 - protein, 5 aa, Artificial Sequence
  Description of Artificial Sequence: Synthetic peptide
IYSMH

SEQ ID NO: 1178 - protein, 17 aa, Artificial Sequence
  Description of Artificial Sequence: Synthetic peptide
SIYSSGGPTKYADSVKG

SEQ ID NO: 1179 - protein, 13 aa, Artificial Sequence
  Description of Artificial Sequence: Synthetic peptide
RRTGIPRRDAFDI

SEQ ID NO: 1180 - protein, 11 aa, Artificial Sequence
  Description of Artificial Sequence: Synthetic peptide
RASQSISSWLA

SEQ ID NO: 1181 - protein, 7 aa, Artificial Sequence
  Description of Artificial Sequence: Synthetic peptide
KASTLES

SEQ ID NO: 1182 - protein, 8 aa, Artificial Sequence
  Description of Artificial Sequence: Synthetic peptide
QQYNTYWT

SEQ ID NO: 1183 - protein, 5 aa, Artificial Sequence
  Description of Artificial Sequence: Synthetic peptide
HYIMM

SEQ ID NO: 1184 - protein, 17 aa, Artificial Sequence
  Description of Artificial Sequence: Synthetic peptide
GIYSSGGITVYADSVKG

SEQ ID NO: 1185 - protein, 13 aa, Artificial Sequence
  Description of Artificial Sequence: Synthetic peptide
RRIGVPRRDSFDM

SEQ ID NO: 1186 - protein, 11 aa, Artificial Sequence
  Description of Artificial Sequence: Synthetic peptide
RASQSISSWLA

SEQ ID NO: 1187 - protein, 7 aa, Artificial Sequence
  Description of Artificial Sequence: Synthetic peptide
KASTLES

SEQ ID NO: 1188 - protein, 8 aa, Artificial Sequence
  Description of Artificial Sequence: Synthetic peptide
QQYNTYWT

SEQ ID NO: 1189 - protein, 5 aa, Artificial Sequence
  Description of Artificial Sequence: Synthetic peptide
HYIMM

SEQ ID NO: 1190 - protein, 17 aa, Artificial Sequence
  Description of Artificial Sequence: Synthetic peptide
GIYSSGGITVYADSVKG

SEQ ID NO: 1191 - protein, 13 aa, Artificial Sequence
  Description of Artificial Sequence: Synthetic peptide
RRTGVPRWDDFDI

SEQ ID NO: 1192 - protein, 11 aa, Artificial Sequence
  Description of Artificial Sequence: Synthetic peptide
RASQSISSWLA

SEQ ID NO: 1193 - protein, 7 aa, Artificial Sequence
  Description of Artificial Sequence: Synthetic peptide
KASTLES

SEQ ID NO: 1194 - protein, 8 aa, Artificial Sequence
  Description of Artificial Sequence: Synthetic peptide
QQYNTYWT

SEQ ID NO: 1195 - protein, 5 aa, Artificial Sequence
  Description of Artificial Sequence: Synthetic peptide
HYIMM

SEQ ID NO: 1196 - protein, 17 aa, Artificial Sequence
  Description of Artificial Sequence: Synthetic peptide
GIYSSGGITVYADSVKG

SEQ ID NO: 1197 - protein, 13 aa, Artificial Sequence
  Description of Artificial Sequence: Synthetic peptide
RRTGVPRRDEFDI

SEQ ID NO: 1198 - protein, 11 aa, Artificial Sequence
  Description of Artificial Sequence: Synthetic peptide
RASQSISSWLA

SEQ ID NO: 1199 - protein, 7 aa, Artificial Sequence
  Description of Artificial Sequence: Synthetic peptide
KASTLES

SEQ ID NO: 1200 - protein, 8 aa, Artificial Sequence
  Description of Artificial Sequence: Synthetic peptide
QQYNTYWT

SEQ ID NO: 1201 - protein, 5 aa, Artificial Sequence
  Description of Artificial Sequence: Synthetic peptide
IYDMI

SEQ ID NO: 1202 - protein, 17 aa, Artificial Sequence
  Description of Artificial Sequence: Synthetic peptide
SIYPSGGNTSYADSVKG

SEQ ID NO: 1203 - protein, 13 aa, Artificial Sequence
  Description of Artificial Sequence: Synthetic peptide
RRTGIPRRDAFDI

SEQ ID NO: 1204 - protein, 11 aa, Artificial Sequence
  Description of Artificial Sequence: Synthetic peptide
RASQSISSWLA

SEQ ID NO: 1205 - protein, 7 aa, Artificial Sequence
  Description of Artificial Sequence: Synthetic peptide
KASTLES

SEQ ID NO: 1206 - protein, 8 aa, Artificial Sequence
  Description of Artificial Sequence: Synthetic peptide
QQYNTYWT

SEQ ID NO: 1207 - protein, 5 aa, Artificial Sequence
  Description of Artificial Sequence: Synthetic peptide
HYIMM

SEQ ID NO: 1208 - protein, 17 aa, Artificial Sequence
  Description of Artificial Sequence: Synthetic peptide
GIYSSGGITVYADSVKG

SEQ ID NO: 1209 - protein, 13 aa, Artificial Sequence
  Description of Artificial Sequence: Synthetic peptide
RRIGVPRRDSFDI

SEQ ID NO: 1210 - protein, 11 aa, Artificial Sequence
  Description of Artificial Sequence: Synthetic peptide
RASQSISSWLA

SEQ ID NO: 1211 - protein, 7 aa, Artificial Sequence
  Description of Artificial Sequence: Synthetic peptide
KASTLES

SEQ ID NO: 1212 - protein, 8 aa, Artificial Sequence
  Description of Artificial Sequence: Synthetic peptide
QQYNTYWT

SEQ ID NO: 1213 - protein, 5 aa, Artificial Sequence
  Description of Artificial Sequence: Synthetic peptide
VYNMH

SEQ ID NO: 1214 - protein, 17 aa, Artificial Sequence
  Description of Artificial Sequence: Synthetic peptide
SIYPSGGMTTYADSVKG

SEQ ID NO: 1215 - protein, 13 aa, Artificial Sequence
  Description of Artificial Sequence: Synthetic peptide
RRTGIPRRDAFDI

SEQ ID NO: 1216 - protein, 11 aa, Artificial Sequence
  Description of Artificial Sequence: Synthetic peptide
RASQSISSWLA

SEQ ID NO: 1217 - protein, 7 aa, Artificial Sequence
  Description of Artificial Sequence: Synthetic peptide
KASTLES

SEQ ID NO: 1218 - protein, 8 aa, Artificial Sequence
  Description of Artificial Sequence: Synthetic peptide
QQYNTYWT

SEQ ID NO: 1219 - protein, 5 aa, Artificial Sequence
  Description of Artificial Sequence: Synthetic peptide
IYDMT

SEQ ID NO: 1220 - protein, 17 aa, Artificial Sequence
  Description of Artificial Sequence: Synthetic peptide
SIYPSGGQTIYADSVKG

SEQ ID NO: 1221 - protein, 13 aa, Artificial Sequence
  Description of Artificial Sequence: Synthetic peptide
RRTGIPRRDAFDI

SEQ ID NO: 1222 - protein, 11 aa, Artificial Sequence
  Description of Artificial Sequence: Synthetic peptide
RASQSISSWLA

SEQ ID NO: 1223 - protein, 7 aa, Artificial Sequence
  Description of Artificial Sequence: Synthetic peptide
KASTLES

SEQ ID NO: 1224 - protein, 8 aa, Artificial Sequence
  Description of Artificial Sequence: Synthetic peptide
QQYNTYWT

SEQ ID NO: 1225 - protein, 5 aa, Artificial Sequence
  Description of Artificial Sequence: Synthetic peptide
HYIMM

SEQ ID NO: 1226 - protein, 17 aa, Artificial Sequence
  Description of Artificial Sequence: Synthetic peptide
GIYSSGGITVYADSVKG

SEQ ID NO: 1227 - protein, 13 aa, Artificial Sequence
  Description of Artificial Sequence: Synthetic peptide
RRTGVPRRDSFDI

SEQ ID NO: 1228 - protein, 11 aa, Artificial Sequence
  Description of Artificial Sequence: Synthetic peptide
RASQSISSWLA

SEQ ID NO: 1229 - protein, 7 aa, Artificial Sequence
  Description of Artificial Sequence: Synthetic peptide
KASTLES

SEQ ID NO: 1230 - protein, 8 aa, Artificial Sequence
  Description of Artificial Sequence: Synthetic peptide
QQYNTYWT

SEQ ID NO: 1231 - protein, 5 aa, Artificial Sequence
  Description of Artificial Sequence: Synthetic peptide
SYNMH

SEQ ID NO: 1232 - protein, 17 aa, Artificial Sequence
  Description of Artificial Sequence: Synthetic peptide
SIVPSGGKTNYADSVKG

SEQ ID NO: 1233 - protein, 13 aa, Artificial Sequence
  Description of Artificial Sequence: Synthetic peptide
RRTGIPRRDAFDI

SEQ ID NO: 1234 - protein, 11 aa, Artificial Sequence
  Description of Artificial Sequence: Synthetic peptide
RASQSISSWLA

SEQ ID NO: 1235 - protein, 7 aa, Artificial Sequence
  Description of Artificial Sequence: Synthetic peptide
KASTLES

SEQ ID NO: 1236 - protein, 8 aa, Artificial Sequence
  Description of Artificial Sequence: Synthetic peptide
QQYNTYWT

SEQ ID NO: 1237 - protein, 5 aa, Artificial Sequence
  Description of Artificial Sequence: Synthetic peptide
RYSMR

SEQ ID NO: 1238 - protein, 17 aa, Artificial Sequence
  Description of Artificial Sequence: Synthetic peptide
VIYPSGGQTYYADSVKG

SEQ ID NO: 1239 - protein, 13 aa, Artificial Sequence
  Description of Artificial Sequence: Synthetic peptide
RRTGIPRRDAFDI

SEQ ID NO: 1240 - protein, 11 aa, Artificial Sequence
  Description of Artificial Sequence: Synthetic peptide
RASQSISSWLA

SEQ ID NO: 1241 - protein, 7 aa, Artificial Sequence
  Description of Artificial Sequence: Synthetic peptide
KASTLES

SEQ ID NO: 1242 - protein, 8 aa, Artificial Sequence
  Description of Artificial Sequence: Synthetic peptide
QQYNTYWT

SEQ ID NO: 1243 - protein, 5 aa, Artificial Sequence
  Description of Artificial Sequence: Synthetic peptide
IYSMQ

SEQ ID NO: 1244 - protein, 17 aa, Artificial Sequence
  Description of Artificial Sequence: Synthetic peptide
SIGSSGGKTLYADSVKG

SEQ ID NO: 1245 - protein, 13 aa, Artificial Sequence
  Description of Artificial Sequence: Synthetic peptide
RRTGIPRRDAFDI

SEQ ID NO: 1246 - protein, 11 aa, Artificial Sequence
  Description of Artificial Sequence: Synthetic peptide
RASQSISSWLA

SEQ ID NO: 1247 - protein, 7 aa, Artificial Sequence
  Description of Artificial Sequence: Synthetic peptide
KASTLES

SEQ ID NO: 1248 - protein, 8 aa, Artificial Sequence
  Description of Artificial Sequence: Synthetic peptide
QQYNTYWT

SEQ ID NO: 1249 - protein, 5 aa, Artificial Sequence
  Description of Artificial Sequence: Synthetic peptide
VYSMT

SEQ ID NO: 1250 - protein, 17 aa, Artificial Sequence
  Description of Artificial Sequence: Synthetic peptide
SIGSSGGSTTYADSVKG

SEQ ID NO: 1251 - protein, 13 aa, Artificial Sequence
  Description of Artificial Sequence: Synthetic peptide
RRTGIPRRDAFDI

SEQ ID NO: 1252 - protein, 11 aa, Artificial Sequence
  Description of Artificial Sequence: Synthetic peptide
RASQSISSWLA

SEQ ID NO: 1253 - protein, 7 aa, Artificial Sequence
  Description of Artificial Sequence: Synthetic peptide
KASTLES

SEQ ID NO: 1254 - protein, 8 aa, Artificial Sequence
  Description of Artificial Sequence: Synthetic peptide
QQYNTYWT

SEQ ID NO: 1255 - protein, 5 aa, Artificial Sequence
  Description of Artificial Sequence: Synthetic peptide
IYDMN

SEQ ID NO: 1256 - protein, 17 aa, Artificial Sequence
  Description of Artificial Sequence: Synthetic peptide
SIYPSGGRTRYADSVKG

SEQ ID NO: 1257 - protein, 13 aa, Artificial Sequence
  Description of Artificial Sequence: Synthetic peptide
RRTGIPRRDAFDI

SEQ ID NO: 1258 - protein, 11 aa, Artificial Sequence
  Description of Artificial Sequence: Synthetic peptide
RASQSISSWLA

SEQ ID NO: 1259 - protein, 7 aa, Artificial Sequence
  Description of Artificial Sequence: Synthetic peptide
KASTLES

SEQ ID NO: 1260 - protein, 8 aa, Artificial Sequence
  Description of Artificial Sequence: Synthetic peptide
QQYNTYWT

SEQ ID NO: 1261 - protein, 5 aa, Artificial Sequence
  Description of Artificial Sequence: Synthetic peptide
HYIMM

SEQ ID NO: 1262 - protein, 17 aa, Artificial Sequence
  Description of Artificial Sequence: Synthetic peptide
GIYSSGGITVYADSVKG

SEQ ID NO: 1263 - protein, 13 aa, Artificial Sequence
  Description of Artificial Sequence: Synthetic peptide
RRTGVPRRDDFDI

SEQ ID NO: 1264 - protein, 11 aa, Artificial Sequence
  Description of Artificial Sequence: Synthetic peptide
RASQSISSWLA

SEQ ID NO: 1265 - protein, 7 aa, Artificial Sequence
  Description of Artificial Sequence: Synthetic peptide
KASTLES

SEQ ID NO: 1266 - protein, 8 aa, Artificial Sequence
  Description of Artificial Sequence: Synthetic peptide
QQYNTYWT

SEQ ID NO: 1267 - protein, 6 aa, Artificial Sequence
  Description of Artificial Sequence: Synthetic peptide
HYMGMN

SEQ ID NO: 1268 - protein, 17 aa, Artificial Sequence
  Description of Artificial Sequence: Synthetic peptide
SIVPSGGWTQYADSVKG

SEQ ID NO: 1269 - protein, 13 aa, Artificial Sequence
  Description of Artificial Sequence: Synthetic peptide
RRTGIPRRDAFDI

SEQ ID NO: 1270 - protein, 11 aa, Artificial Sequence
  Description of Artificial Sequence: Synthetic peptide
RASQSISSWLA

SEQ ID NO: 1271 - protein, 7 aa, Artificial Sequence
  Description of Artificial Sequence: Synthetic peptide
KASTLES

SEQ ID NO: 1272 - protein, 8 aa, Artificial Sequence
  Description of Artificial Sequence: Synthetic peptide
QQYNTYWT

SEQ ID NO: 1273 - protein, 5 aa, Artificial Sequence
  Description of Artificial Sequence: Synthetic peptide
TYTMR

SEQ ID NO: 1274 - protein, 17 aa, Artificial Sequence
  Description of Artificial Sequence: Synthetic peptide
SIYPSGGKTQYADSVKG

SEQ ID NO: 1275 - protein, 13 aa, Artificial Sequence
  Description of Artificial Sequence: Synthetic peptide
RRTGIPRRDAFDI

SEQ ID NO: 1276 - protein, 11 aa, Artificial Sequence
  Description of Artificial Sequence: Synthetic peptide
RASQSISSWLA

SEQ ID NO: 1277 - protein, 7 aa, Artificial Sequence
  Description of Artificial Sequence: Synthetic peptide
KASTLES

SEQ ID NO: 1278 - protein, 8 aa, Artificial Sequence
  Description of Artificial Sequence: Synthetic peptide
QQYNTYWT

SEQ ID NO: 1279 - protein, 5 aa, Artificial Sequence
  Description of Artificial Sequence: Synthetic peptide
IYDMW

SEQ ID NO: 1280 - protein, 17 aa, Artificial Sequence
  Description of Artificial Sequence: Synthetic peptide
SIRPSGGITKYADSVKG

SEQ ID NO: 1281 - protein, 13 aa, Artificial Sequence
  Description of Artificial Sequence: Synthetic peptide
RRTGIPRRDAFDI

SEQ ID NO: 1282 - protein, 11 aa, Artificial Sequence
  Description of Artificial Sequence: Synthetic peptide
RASQSISSWLA

SEQ ID NO: 1283 - protein, 7 aa, Artificial Sequence
  Description of Artificial Sequence: Synthetic peptide
KASTLES

SEQ ID NO: 1284 - protein, 8 aa, Artificial Sequence
  Description of Artificial Sequence: Synthetic peptide
QQYNTYWT

SEQ ID NO: 1285 - protein, 5 aa, Artificial Sequence
  Description of Artificial Sequence: Synthetic peptide
IYNMI

SEQ ID NO: 1286 - protein, 17 aa, Artificial Sequence
  Description of Artificial Sequence: Synthetic peptide
SIYPSGGWTTYADSVKG

SEQ ID NO: 1287 - protein, 13 aa, Artificial Sequence
  Description of Artificial Sequence: Synthetic peptide
RRTGIPRRDAFDI

SEQ ID NO: 1288 - protein, 11 aa, Artificial Sequence
  Description of Artificial Sequence: Synthetic peptide
RASQSISSWLA

SEQ ID NO: 1289 - protein, 7 aa, Artificial Sequence
  Description of Artificial Sequence: Synthetic peptide
KASTLES

SEQ ID NO: 1290 - protein, 8 aa, Artificial Sequence
  Description of Artificial Sequence: Synthetic peptide
QQYNTYWT

SEQ ID NO: 1291 - protein, 5 aa, Artificial Sequence
  Description of Artificial Sequence: Synthetic peptide
IYHMY

SEQ ID NO: 1292 - protein, 17 aa, Artificial Sequence
  Description of Artificial Sequence: Synthetic peptide
SIGPSGGPTGYADSVKG

SEQ ID NO: 1293 - protein, 13 aa, Artificial Sequence
  Description of Artificial Sequence: Synthetic peptide
RRTGIPRRDAFDI

SEQ ID NO: 1294 - protein, 11 aa, Artificial Sequence
  Description of Artificial Sequence: Synthetic peptide
RASQSISSWLA

SEQ ID NO: 1295 - protein, 7 aa, Artificial Sequence
  Description of Artificial Sequence: Synthetic peptide
KASTLES

SEQ ID NO: 1296 - protein, 8 aa, Artificial Sequence
  Description of Artificial Sequence: Synthetic peptide
QQYNTYWT

SEQ ID NO: 1297 - protein, 5 aa, Artificial Sequence
  Description of Artificial Sequence: Synthetic peptide
TYSMY

SEQ ID NO: 1298 - protein, 17 aa, Artificial Sequence
  Description of Artificial Sequence: Synthetic peptide
SIYPSGGLTWYADSVKG

SEQ ID NO: 1299 - protein, 13 aa, Artificial Sequence
  Description of Artificial Sequence: Synthetic peptide
RRTGIPRRDAFDI

SEQ ID NO: 1300 - protein, 11 aa, Artificial Sequence
  Description of Artificial Sequence: Synthetic peptide
RASQSISSWLA

SEQ ID NO: 1301 - protein, 7 aa, Artificial Sequence
  Description of Artificial Sequence: Synthetic peptide
KASTLES

SEQ ID NO: 1302 - protein, 8 aa, Artificial Sequence
  Description of Artificial Sequence: Synthetic peptide
QQYNTYWT

SEQ ID NO: 1303 - protein, 5 aa, Artificial Sequence
  Description of Artificial Sequence: Synthetic peptide
HYIMM

SEQ ID NO: 1304 - protein, 17 aa, Artificial Sequence
  Description of Artificial Sequence: Synthetic peptide
GIYSSGGITVYADSVKG

SEQ ID NO: 1305 - protein, 13 aa, Artificial Sequence
  Description of Artificial Sequence: Synthetic peptide
RRIGVPRRDDFDI

SEQ ID NO: 1306 - protein, 11 aa, Artificial Sequence
  Description of Artificial Sequence: Synthetic peptide
RASQSISSWLA

SEQ ID NO: 1307 - protein, 7 aa, Artificial Sequence
  Description of Artificial Sequence: Synthetic peptide
KASTLES

SEQ ID NO: 1308 - protein, 8 aa, Artificial Sequence
  Description of Artificial Sequence: Synthetic peptide
QQYNTYWT

SEQ ID NO: 1309 - protein, 5 aa, Artificial Sequence
  Description of Artificial Sequence: Synthetic peptide
IYDMY

SEQ ID NO: 1310 - protein, 17 aa, Artificial Sequence
  Description of Artificial Sequence: Synthetic peptide
SIGPSGGPTAYADSVKG

SEQ ID NO: 1311 - protein, 13 aa, Artificial Sequence
  Description of Artificial Sequence: Synthetic peptide
RRTGIPRRDAFDI

SEQ ID NO: 1312 - protein, 11 aa, Artificial Sequence
  Description of Artificial Sequence: Synthetic peptide
RASQSISSWLA

SEQ ID NO: 1313 - protein, 7 aa, Artificial Sequence
  Description of Artificial Sequence: Synthetic peptide
KASTLES

SEQ ID NO: 1314 - protein, 8 aa, Artificial Sequence
  Description of Artificial Sequence: Synthetic peptide
QQYNTYWT

SEQ ID NO: 1315 - protein, 5 aa, Artificial Sequence
  Description of Artificial Sequence: Synthetic peptide
VYSMW

SEQ ID NO: 1316 - protein, 17 aa, Artificial Sequence
  Description of Artificial Sequence: Synthetic peptide
SISSSGGMTEYADSVKG

SEQ ID NO: 1317 - protein, 13 aa, Artificial Sequence
  Description of Artificial Sequence: Synthetic peptide
RRTGIPRRDAFDI

SEQ ID NO: 1318 - protein, 11 aa, Artificial Sequence
  Description of Artificial Sequence: Synthetic peptide
RASQSISSWLA

SEQ ID NO: 1319 - protein, 7 aa, Artificial Sequence
  Description of Artificial Sequence: Synthetic peptide
KASTLES

SEQ ID NO: 1320 - protein, 8 aa, Artificial Sequence
  Description of Artificial Sequence: Synthetic peptide
QQYNTYWT

SEQ ID NO: 1321 - protein, 5 aa, Artificial Sequence
  Description of Artificial Sequence: Synthetic peptide
HYIMM

SEQ ID NO: 1322 - protein, 17 aa, Artificial Sequence
  Description of Artificial Sequence: Synthetic peptide
GIYSSGGITVYADSVKG

SEQ ID NO: 1323 - protein, 13 aa, Artificial Sequence
  Description of Artificial Sequence: Synthetic peptide
RRRGVPRRDDFDI

SEQ ID NO: 1324 - protein, 11 aa, Artificial Sequence
  Description of Artificial Sequence: Synthetic peptide
RASQSISSWLA

SEQ ID NO: 1325 - protein, 7 aa, Artificial Sequence
  Description of Artificial Sequence: Synthetic peptide
KASTLES

SEQ ID NO: 1326 - protein, 8 aa, Artificial Sequence
  Description of Artificial Sequence: Synthetic peptide
QQYNTYWT

SEQ ID NO: 1327 - protein, 5 aa, Artificial Sequence
  Description of Artificial Sequence: Synthetic peptide
IYGMF

SEQ ID NO: 1328 - protein, 17 aa, Artificial Sequence
  Description of Artificial Sequence: Synthetic peptide
GIGPSGGPTKYADSVKG

SEQ ID NO: 1329 - protein, 13 aa, Artificial Sequence
  Description of Artificial Sequence: Synthetic peptide
RRTGIPRRDAFDI

SEQ ID NO: 1330 - protein, 11 aa, Artificial Sequence
  Description of Artificial Sequence: Synthetic peptide
RASQSISSWLA

SEQ ID NO: 1331 - protein, 7 aa, Artificial Sequence
  Description of Artificial Sequence: Synthetic peptide
KASTLES

SEQ ID NO: 1332 - protein, 8 aa, Artificial Sequence
  Description of Artificial Sequence: Synthetic peptide
QQYNTYWT

SEQ ID NO: 1333 - protein, 5 aa, Artificial Sequence
  Description of Artificial Sequence: Synthetic peptide
IYSMF

SEQ ID NO: 1334 - protein, 17 aa, Artificial Sequence
  Description of Artificial Sequence: Synthetic peptide
SIGPSGGVTHYADSVKG

SEQ ID NO: 1335 - protein, 13 aa, Artificial Sequence
  Description of Artificial Sequence: Synthetic peptide
RRTGIPRRDAFDI

SEQ ID NO: 1336 - protein, 11 aa, Artificial Sequence
  Description of Artificial Sequence: Synthetic peptide
RASQSISSWLA

SEQ ID NO: 1337 - protein, 7 aa, Artificial Sequence
  Description of Artificial Sequence: Synthetic peptide
KASTLES

SEQ ID NO: 1338 - protein, 8 aa, Artificial Sequence
  Description of Artificial Sequence: Synthetic peptide
QQYNTYWT

SEQ ID NO: 1339 - protein, 5 aa, Artificial Sequence
  Description of Artificial Sequence: Synthetic peptide
IYSMY

SEQ ID NO: 1340 - protein, 17 aa, Artificial Sequence
  Description of Artificial Sequence: Synthetic peptide
YIRPSGGNTKYADSVKG

SEQ ID NO: 1341 - protein, 13 aa, Artificial Sequence
  Description of Artificial Sequence: Synthetic peptide
RRTGIPRRDAFDI

SEQ ID NO: 1342 - protein, 11 aa, Artificial Sequence
  Description of Artificial Sequence: Synthetic peptide
RASQSISSWLA

SEQ ID NO: 1343 - protein, 7 aa, Artificial Sequence
  Description of Artificial Sequence: Synthetic peptide
KASTLES

SEQ ID NO: 1344 - protein, 8 aa, Artificial Sequence
  Description of Artificial Sequence: Synthetic peptide
QQYNTYWT

SEQ ID NO: 1345 - protein, 5 aa, Artificial Sequence
  Description of Artificial Sequence: Synthetic peptide
RYSMI

SEQ ID NO: 1346 - protein, 17 aa, Artificial Sequence
  Description of Artificial Sequence: Synthetic peptide
SIWSSGGATEYADSVKG

SEQ ID NO: 1347 - protein, 13 aa, Artificial Sequence
  Description of Artificial Sequence: Synthetic peptide
RRTGIPRRDAFDI

SEQ ID NO: 1348 - protein, 11 aa, Artificial Sequence
  Description of Artificial Sequence: Synthetic peptide
RASQSISSWLA

SEQ ID NO: 1349 - protein, 7 aa, Artificial Sequence
  Description of Artificial Sequence: Synthetic peptide
KASTLES

SEQ ID NO: 1350 - protein, 8 aa, Artificial Sequence
  Description of Artificial Sequence: Synthetic peptide
QQYNTYWT

SEQ ID NO: 1351 - protein, 5 aa, Artificial Sequence
  Description of Artificial Sequence: Synthetic peptide
HYIMM

SEQ ID NO: 1352 - protein, 17 aa, Artificial Sequence
  Description of Artificial Sequence: Synthetic peptide
GIYSSGGITVYADSVKG

SEQ ID NO: 1353 - protein, 13 aa, Artificial Sequence
  Description of Artificial Sequence: Synthetic peptide
RRIGVPRRDAFDI

SEQ ID NO: 1354 - protein, 11 aa, Artificial Sequence
  Description of Artificial Sequence: Synthetic peptide
RASQSISSWLA

SEQ ID NO: 1355 - protein, 7 aa, Artificial Sequence
  Description of Artificial Sequence: Synthetic peptide
KASTLES

SEQ ID NO: 1356 - protein, 8 aa, Artificial Sequence
  Description of Artificial Sequence: Synthetic peptide
QQYNTYWT

SEQ ID NO: 1357 - protein, 5 aa, Artificial Sequence
  Description of Artificial Sequence: Synthetic peptide
HYIMM

SEQ ID NO: 1358 - protein, 17 aa, Artificial Sequence
  Description of Artificial Sequence: Synthetic peptide
GIYSSGGITVYADSVKG

SEQ ID NO: 1359 - protein, 13 aa, Artificial Sequence
  Description of Artificial Sequence: Synthetic peptide
RRTGVPRRDSFEI

SEQ ID NO: 1360 - protein, 11 aa, Artificial Sequence
  Description of Artificial Sequence: Synthetic peptide
RASQSISSWLA

SEQ ID NO: 1361 - protein, 7 aa, Artificial Sequence
  Description of Artificial Sequence: Synthetic peptide
KASTLES

SEQ ID NO: 1362 - protein, 8 aa, Artificial Sequence
  Description of Artificial Sequence: Synthetic peptide
QQYNTYWT

SEQ ID NO: 1363 - protein, 5 aa, Artificial Sequence
  Description of Artificial Sequence: Synthetic peptide
KYWMY

SEQ ID NO: 1364 - protein, 17 aa, Artificial Sequence
  Description of Artificial Sequence: Synthetic peptide
YIRPSGGQTYYADSVKG

SEQ ID NO: 1365 - protein, 13 aa, Artificial Sequence
  Description of Artificial Sequence: Synthetic peptide
RRTGIPRRDAFDI

SEQ ID NO: 1366 - protein, 11 aa, Artificial Sequence
  Description of Artificial Sequence: Synthetic peptide
RASQSISSWLA

SEQ ID NO: 1367 - protein, 7 aa, Artificial Sequence
  Description of Artificial Sequence: Synthetic peptide
KASTLES

SEQ ID NO: 1368 - protein, 8 aa, Artificial Sequence
  Description of Artificial Sequence: Synthetic peptide
QQYNTYWT

SEQ ID NO: 1369 - protein, 5 aa, Artificial Sequence
  Description of Artificial Sequence: Synthetic peptide
RYQMH

SEQ ID NO: 1370 - protein, 17 aa, Artificial Sequence
  Description of Artificial Sequence: Synthetic peptide
WISPSGGITGYADSVKG

SEQ ID NO: 1371 - protein, 13 aa, Artificial Sequence
  Description of Artificial Sequence: Synthetic peptide
RRTGIPRRDAFDI

SEQ ID NO: 1372 - protein, 11 aa, Artificial Sequence
  Description of Artificial Sequence: Synthetic peptide
RASQSISSWLA

SEQ ID NO: 1373 - protein, 7 aa, Artificial Sequence
  Description of Artificial Sequence: Synthetic peptide
KASTLES

SEQ ID NO: 1374 - protein, 8 aa, Artificial Sequence
  Description of Artificial Sequence: Synthetic peptide
QQYNTYWT

SEQ ID NO: 1375 - protein, 5 aa, Artificial Sequence
  Description of Artificial Sequence: Synthetic peptide
PYNMY

SEQ ID NO: 1376 - protein, 16 aa, Artificial Sequence
  Description of Artificial Sequence: Synthetic peptide
WIVPGGVTKYADSVKG

SEQ ID NO: 1377 - protein, 13 aa, Artificial Sequence
  Description of Artificial Sequence: Synthetic peptide
RRTGIPRRDAFDI

SEQ ID NO: 1378 - protein, 11 aa, Artificial Sequence
  Description of Artificial Sequence: Synthetic peptide
RASQSISSWLA

SEQ ID NO: 1379 - protein, 7 aa, Artificial Sequence
  Description of Artificial Sequence: Synthetic peptide
KASTLES

SEQ ID NO: 1380 - protein, 8 aa, Artificial Sequence
  Description of Artificial Sequence: Synthetic peptide
QQYNTYWT

SEQ ID NO: 1381 - protein, 5 aa, Artificial Sequence
  Description of Artificial Sequence: Synthetic peptide
HYIMM

SEQ ID NO: 1382 - protein, 17 aa, Artificial Sequence
  Description of Artificial Sequence: Synthetic peptide
GIYSSGGITVYADSVKG

SEQ ID NO: 1383 - protein, 13 aa, Artificial Sequence
  Description of Artificial Sequence: Synthetic peptide
RRTGVPRRNAFDN

SEQ ID NO: 1384 - protein, 11 aa, Artificial Sequence
  Description of Artificial Sequence: Synthetic peptide
RASQSISSWLA

SEQ ID NO: 1385 - protein, 7 aa, Artificial Sequence
  Description of Artificial Sequence: Synthetic peptide
KASTLES

SEQ ID NO: 1386 - protein, 8 aa, Artificial Sequence
  Description of Artificial Sequence: Synthetic peptide
QQYNTYWT

SEQ ID NO: 1387 - protein, 5 aa, Artificial Sequence
  Description of Artificial Sequence: Synthetic peptide
HYIMM

SEQ ID NO: 1388 - protein, 17 aa, Artificial Sequence
  Description of Artificial Sequence: Synthetic peptide
GIYSSGGITVYADSVKG

SEQ ID NO: 1389 - protein, 13 aa, Artificial Sequence
  Description of Artificial Sequence: Synthetic peptide
RRTGVPRRDAFDI

SEQ ID NO: 1390 - protein, 11 aa, Artificial Sequence
  Description of Artificial Sequence: Synthetic peptide
RASQSISSWLA

SEQ ID NO: 1391 - protein, 7 aa, Artificial Sequence
  Description of Artificial Sequence: Synthetic peptide
KASTLES

SEQ ID NO: 1392 - protein, 8 aa, Artificial Sequence
  Description of Artificial Sequence: Synthetic peptide
QQYNTYWT

SEQ ID NO: 1393 - protein, 5 aa, Artificial Sequence
  Description of Artificial Sequence: Synthetic peptide
HYIMM

SEQ ID NO: 1394 - protein, 17 aa, Artificial Sequence
  Description of Artificial Sequence: Synthetic peptide
GIYSSGGITVYADSVKG

SEQ ID NO: 1395 - protein, 13 aa, Artificial Sequence
  Description of Artificial Sequence: Synthetic peptide
RRTGVPRWDAFDI

SEQ ID NO: 1396 - protein, 11 aa, Artificial Sequence
  Description of Artificial Sequence: Synthetic peptide
RASQSISSWLA

SEQ ID NO: 1397 - protein, 7 aa, Artificial Sequence
  Description of Artificial Sequence: Synthetic peptide
KASTLES

SEQ ID NO: 1398 - protein, 8 aa, Artificial Sequence
  Description of Artificial Sequence: Synthetic peptide
QQYNTYWT

SEQ ID NO: 1399 - protein, 5 aa, Artificial Sequence
  Description of Artificial Sequence: Synthetic peptide
MYQMF

SEQ ID NO: 1400 - protein, 16 aa, Artificial Sequence
  Description of Artificial Sequence: Synthetic peptide
SISPGGGTQYADSVKG

SEQ ID NO: 1401 - protein, 13 aa, Artificial Sequence
  Description of Artificial Sequence: Synthetic peptide
RRTGIPRRDAFDI

SEQ ID NO: 1402 - protein, 11 aa, Artificial Sequence
  Description of Artificial Sequence: Synthetic peptide
RASQSISSWLA

SEQ ID NO: 1403 - protein, 7 aa, Artificial Sequence
  Description of Artificial Sequence: Synthetic peptide
KASTLES

SEQ ID NO: 1404 - protein, 8 aa, Artificial Sequence
  Description of Artificial Sequence: Synthetic peptide
QQYNTYWT

SEQ ID NO: 1405 - protein, 5 aa, Artificial Sequence
  Description of Artificial Sequence: Synthetic peptide
HYIMM

SEQ ID NO: 1406 - protein, 17 aa, Artificial Sequence
  Description of Artificial Sequence: Synthetic peptide
GIYSSGGITVYADSVKG

SEQ ID NO: 1407 - protein, 13 aa, Artificial Sequence
  Description of Artificial Sequence: Synthetic peptide
RRTGVPRRDVFDI

SEQ ID NO: 1408 - protein, 11 aa, Artificial Sequence
  Description of Artificial Sequence: Synthetic peptide
RASQSISSWLA

SEQ ID NO: 1409 - protein, 7 aa, Artificial Sequence
  Description of Artificial Sequence: Synthetic peptide
KASTLES

SEQ ID NO: 1410 - protein, 8 aa, Artificial Sequence
  Description of Artificial Sequence: Synthetic peptide
QQYNTYWT

SEQ ID NO: 1411 - protein, 5 aa, Artificial Sequence
  Description of Artificial Sequence: Synthetic peptide
RYKMY

SEQ ID NO: 1412 - protein, 17 aa, Artificial Sequence
  Description of Artificial Sequence: Synthetic peptide
VIGPSGGATFYADSVKG

SEQ ID NO: 1413 - protein, 13 aa, Artificial Sequence
  Description of Artificial Sequence: Synthetic peptide
RRTGIPRRDAFDI

SEQ ID NO: 1414 - protein, 11 aa, Artificial Sequence
  Description of Artificial Sequence: Synthetic peptide
RASQSISSWLA

SEQ ID NO: 1415 - protein, 7 aa, Artificial Sequence
  Description of Artificial Sequence: Synthetic peptide
KASTLES

SEQ ID NO: 1416 - protein, 8 aa, Artificial Sequence
  Description of Artificial Sequence: Synthetic peptide
QQYNTYWT

SEQ ID NO: 1417 - protein, 5 aa, Artificial Sequence
  Description of Artificial Sequence: Synthetic peptide
RYVMW

SEQ ID NO: 1418 - protein, 16 aa, Artificial Sequence
  Description of Artificial Sequence: Synthetic peptide
SISPSGDTHYADSVKG

SEQ ID NO: 1419 - protein, 13 aa, Artificial Sequence
  Description of Artificial Sequence: Synthetic peptide
RRTGIPRRDAFDI

SEQ ID NO: 1420 - protein, 11 aa, Artificial Sequence
  Description of Artificial Sequence: Synthetic peptide
RASQSISSWLA

SEQ ID NO: 1421 - protein, 7 aa, Artificial Sequence
  Description of Artificial Sequence: Synthetic peptide
KASTLES

SEQ ID NO: 1422 - protein, 8 aa, Artificial Sequence
  Description of Artificial Sequence: Synthetic peptide
QQYNTYWT

SEQ ID NO: 1423 - protein, 5 aa, Artificial Sequence
  Description of Artificial Sequence: Synthetic peptide
HYIMM

SEQ ID NO: 1424 - protein, 17 aa, Artificial Sequence
  Description of Artificial Sequence: Synthetic peptide
GIYSSGGITVYADSVKG

SEQ ID NO: 1425 - protein, 13 aa, Artificial Sequence
  Description of Artificial Sequence: Synthetic peptide
RRTGVPRRDAFDN

SEQ ID NO: 1426 - protein, 11 aa, Artificial Sequence
  Description of Artificial Sequence: Synthetic peptide
RASQSISSWLA

SEQ ID NO: 1427 - protein, 7 aa, Artificial Sequence
  Description of Artificial Sequence: Synthetic peptide
KASTLES

SEQ ID NO: 1428 - protein, 8 aa, Artificial Sequence
  Description of Artificial Sequence: Synthetic peptide
QQYNTYWT

SEQ ID NO: 1429 - protein, 5 aa, Artificial Sequence
  Description of Artificial Sequence: Synthetic peptide
HYIMM

SEQ ID NO: 1430 - protein, 17 aa, Artificial Sequence
  Description of Artificial Sequence: Synthetic peptide
GIYSSGGITVYADSVKG

SEQ ID NO: 1431 - protein, 13 aa, Artificial Sequence
  Description of Artificial Sequence: Synthetic peptide
RRSGVPRRDDFDI

SEQ ID NO: 1432 - protein, 11 aa, Artificial Sequence
  Description of Artificial Sequence: Synthetic peptide
RASQSISSWLA

SEQ ID NO: 1433 - protein, 7 aa, Artificial Sequence
  Description of Artificial Sequence: Synthetic peptide
KASTLES

SEQ ID NO: 1434 - protein, 8 aa, Artificial Sequence
  Description of Artificial Sequence: Synthetic peptide
QQYNTYWT

SEQ ID NO: 1435 - protein, 5 aa, Artificial Sequence
  Description of Artificial Sequence: Synthetic peptide
HYIMM

SEQ ID NO: 1436 - protein, 17 aa, Artificial Sequence
  Description of Artificial Sequence: Synthetic peptide
GIYSSGGITVYADSVKG

SEQ ID NO: 1437 - protein, 13 aa, Artificial Sequence
  Description of Artificial Sequence: Synthetic peptide
RRKGIPRRDDFDI

SEQ ID NO: 1438 - protein, 11 aa, Artificial Sequence
  Description of Artificial Sequence: Synthetic peptide
RASQSISSWLA

SEQ ID NO: 1439 - protein, 7 aa, Artificial Sequence
  Description of Artificial Sequence: Synthetic peptide
KASTLES

SEQ ID NO: 1440 - protein, 8 aa, Artificial Sequence
  Description of Artificial Sequence: Synthetic peptide
QQYNTYWT

SEQ ID NO: 1441 - protein, 5 aa, Artificial Sequence
  Description of Artificial Sequence: Synthetic peptide
KYSMA

SEQ ID NO: 1442 - protein, 17 aa, Artificial Sequence
  Description of Artificial Sequence: Synthetic peptide
GIYPSGGRTLYADSVKG

SEQ ID NO: 1443 - protein, 13 aa, Artificial Sequence
  Description of Artificial Sequence: Synthetic peptide
RRTGIPRRDAFDI

SEQ ID NO: 1444 - protein, 11 aa, Artificial Sequence
  Description of Artificial Sequence: Synthetic peptide
RASQSISSWLA

SEQ ID NO: 1445 - protein, 7 aa, Artificial Sequence
  Description of Artificial Sequence: Synthetic peptide
KASTLES

SEQ ID NO: 1446 - protein, 8 aa, Artificial Sequence
  Description of Artificial Sequence: Synthetic peptide
QQYNTYWT

SEQ ID NO: 1447 - protein, 5 aa, Artificial Sequence
  Description of Artificial Sequence: Synthetic peptide
IYFMS

SEQ ID NO: 1448 - protein, 17 aa, Artificial Sequence
  Description of Artificial Sequence: Synthetic peptide
SIRSSGGPTWYADSVKG

SEQ ID NO: 1449 - protein, 13 aa, Artificial Sequence
  Description of Artificial Sequence: Synthetic peptide
RRTGIPRRDAFDI

SEQ ID NO: 1450 - protein, 11 aa, Artificial Sequence
  Description of Artificial Sequence: Synthetic peptide
RASQSISSWLA

SEQ ID NO: 1451 - protein, 7 aa, Artificial Sequence
  Description of Artificial Sequence: Synthetic peptide
KASTLES

SEQ ID NO: 1452 - protein, 8 aa, Artificial Sequence
  Description of Artificial Sequence: Synthetic peptide
QQYNTYWT

SEQ ID NO: 1453 - protein, 5 aa, Artificial Sequence
  Description of Artificial Sequence: Synthetic peptide
QYFMH

SEQ ID NO: 1454 - protein, 17 aa, Artificial Sequence
  Description of Artificial Sequence: Synthetic peptide
YIYPSGGMTEYADSVKG

SEQ ID NO: 1455 - protein, 13 aa, Artificial Sequence
  Description of Artificial Sequence: Synthetic peptide
RRTGIPRRDAFDI

SEQ ID NO: 1456 - protein, 11 aa, Artificial Sequence
  Description of Artificial Sequence: Synthetic peptide
RASQSISSWLA

SEQ ID NO: 1457 - protein, 7 aa, Artificial Sequence
  Description of Artificial Sequence: Synthetic peptide
KASTLES

SEQ ID NO: 1458 - protein, 8 aa, Artificial Sequence
  Description of Artificial Sequence: Synthetic peptide
QQYNTYWT

SEQ ID NO: 1459 - protein, 5 aa, Artificial Sequence
  Description of Artificial Sequence: Synthetic peptide
IYTMY

SEQ ID NO: 1460 - protein, 17 aa, Artificial Sequence
  Description of Artificial Sequence: Synthetic peptide
SISPSGGWTYYADSVKG

SEQ ID NO: 1461 - protein, 13 aa, Artificial Sequence
  Description of Artificial Sequence: Synthetic peptide
RRTGIPRRDAFDI

SEQ ID NO: 1462 - protein, 11 aa, Artificial Sequence
  Description of Artificial Sequence: Synthetic peptide
RASQSISSWLA

SEQ ID NO: 1463 - protein, 7 aa, Artificial Sequence
  Description of Artificial Sequence: Synthetic peptide
KASTLES

SEQ ID NO: 1464 - protein, 8 aa, Artificial Sequence
  Description of Artificial Sequence: Synthetic peptide
QQYNTYWT

SEQ ID NO: 1465 - protein, 5 aa, Artificial Sequence
  Description of Artificial Sequence: Synthetic peptide
PYLMW

SEQ ID NO: 1466 - protein, 17 aa, Artificial Sequence
  Description of Artificial Sequence: Synthetic peptide
YIGPSGGPTHYADSVKG

SEQ ID NO: 1467 - protein, 13 aa, Artificial Sequence
  Description of Artificial Sequence: Synthetic peptide
RRTGIPRRDAFDI

SEQ ID NO: 1468 - protein, 11 aa, Artificial Sequence
  Description of Artificial Sequence: Synthetic peptide
RASQSISSWLA

SEQ ID NO: 1469 - protein, 7 aa, Artificial Sequence
  Description of Artificial Sequence: Synthetic peptide
KASTLES

SEQ ID NO: 1470 - protein, 8 aa, Artificial Sequence
  Description of Artificial Sequence: Synthetic peptide
QQYNTYWT

SEQ ID NO: 1471 - protein, 5 aa, Artificial Sequence
  Description of Artificial Sequence: Synthetic peptide
IYTMM

SEQ ID NO: 1472 - protein, 17 aa, Artificial Sequence
  Description of Artificial Sequence: Synthetic peptide
SIWSSGGQTKYADSVKG

SEQ ID NO: 1473 - protein, 13 aa, Artificial Sequence
  Description of Artificial Sequence: Synthetic peptide
RRTGIPRRDAFDI

SEQ ID NO: 1474 - protein, 11 aa, Artificial Sequence
  Description of Artificial Sequence: Synthetic peptide
RASQSISSWLA

SEQ ID NO: 1475 - protein, 7 aa, Artificial Sequence
  Description of Artificial Sequence: Synthetic peptide
KASTLES

SEQ ID NO: 1476 - protein, 8 aa, Artificial Sequence
  Description of Artificial Sequence: Synthetic peptide
QQYNTYWT

SEQ ID NO: 1477 - protein, 5 aa, Artificial Sequence
  Description of Artificial Sequence: Synthetic peptide
HYIMM

SEQ ID NO: 1478 - protein, 17 aa, Artificial Sequence
  Description of Artificial Sequence: Synthetic peptide
GIYSSGGITVYADSVKG

SEQ ID NO: 1479 - protein, 13 aa, Artificial Sequence
  Description of Artificial Sequence: Synthetic peptide
RRTGVPRRDALDN

SEQ ID NO: 1480 - protein, 11 aa, Artificial Sequence
  Description of Artificial Sequence: Synthetic peptide
RASQSISSWLA

SEQ ID NO: 1481 - protein, 7 aa, Artificial Sequence
  Description of Artificial Sequence: Synthetic peptide
KASTLES

SEQ ID NO: 1482 - protein, 8 aa, Artificial Sequence
  Description of Artificial Sequence: Synthetic peptide
QQYNTYWT

SEQ ID NO: 1483 - protein, 5 aa, Artificial Sequence
  Description of Artificial Sequence: Synthetic peptide
HYIMM

SEQ ID NO: 1484 - protein, 17 aa, Artificial Sequence
  Description of Artificial Sequence: Synthetic peptide
GIYSSGGITVYADSVKG

SEQ ID NO: 1485 - protein, 13 aa, Artificial Sequence
  Description of Artificial Sequence: Synthetic peptide
RRPGVPRRDAFDI

SEQ ID NO: 1486 - protein, 11 aa, Artificial Sequence
  Description of Artificial Sequence: Synthetic peptide
RASQSISSWLA

SEQ ID NO: 1487 - protein, 7 aa, Artificial Sequence
  Description of Artificial Sequence: Synthetic peptide
KASTLES

SEQ ID NO: 1488 - protein, 8 aa, Artificial Sequence
  Description of Artificial Sequence: Synthetic peptide
QQYNTYWT

SEQ ID NO: 1489 - protein, 5 aa, Artificial Sequence
  Description of Artificial Sequence: Synthetic peptide
RYSMS

SEQ ID NO: 1490 - protein, 17 aa, Artificial Sequence
  Description of Artificial Sequence: Synthetic peptide
GISPSGGETSYADSVKG

SEQ ID NO: 1491 - protein, 13 aa, Artificial Sequence
  Description of Artificial Sequence: Synthetic peptide
RRTGIPRRDAFDI

SEQ ID NO: 1492 - protein, 11 aa, Artificial Sequence
  Description of Artificial Sequence: Synthetic peptide
RASQSISSWLA

SEQ ID NO: 1493 - protein, 7 aa, Artificial Sequence
  Description of Artificial Sequence: Synthetic peptide
KASTLES

SEQ ID NO: 1494 - protein, 8 aa, Artificial Sequence
  Description of Artificial Sequence: Synthetic peptide
QQYNTYWT

SEQ ID NO: 1495 - protein, 5 aa, Artificial Sequence
  Description of Artificial Sequence: Synthetic peptide
WYMMQ

SEQ ID NO: 1496 - protein, 16 aa, Artificial Sequence
  Description of Artificial Sequence: Synthetic peptide
RISPSGGTTYADSVKG

SEQ ID NO: 1497 - protein, 13 aa, Artificial Sequence
  Description of Artificial Sequence: Synthetic peptide
RRTGIPRRDAFDI

SEQ ID NO: 1498 - protein, 11 aa, Artificial Sequence
  Description of Artificial Sequence: Synthetic peptide
RASQSISSWLA

SEQ ID NO: 1499 - protein, 7 aa, Artificial Sequence
  Description of Artificial Sequence: Synthetic peptide
KASTLES

SEQ ID NO: 1500 - protein, 8 aa, Artificial Sequence
  Description of Artificial Sequence: Synthetic peptide
QQYNTYWT

SEQ ID NO: 1501 - protein, 5 aa, Artificial Sequence
  Description of Artificial Sequence: Synthetic peptide
QYMMM

SEQ ID NO: 1502 - protein, 17 aa, Artificial Sequence
  Description of Artificial Sequence: Synthetic peptide
GISSSGGHTDYADSVKG

SEQ ID NO: 1503 - protein, 13 aa, Artificial Sequence
  Description of Artificial Sequence: Synthetic peptide
RRTGIPRRDAFDI

SEQ ID NO: 1504 - protein, 11 aa, Artificial Sequence
  Description of Artificial Sequence: Synthetic peptide
RASQSISSWLA

SEQ ID NO: 1505 - protein, 7 aa, Artificial Sequence
  Description of Artificial Sequence: Synthetic peptide
KASTLES

SEQ ID NO: 1506 - protein, 8 aa, Artificial Sequence
  Description of Artificial Sequence: Synthetic peptide
QQYNTYWT

SEQ ID NO: 1507 - protein, 5 aa, Artificial Sequence
  Description of Artificial Sequence: Synthetic peptide
VYAMR

SEQ ID NO: 1508 - protein, 17 aa, Artificial Sequence
  Description of Artificial Sequence: Synthetic peptide
SIYPSGGKTWYADSVKG

SEQ ID NO: 1509 - protein, 13 aa, Artificial Sequence
  Description of Artificial Sequence: Synthetic peptide
RRTGIPRRDAFDI

SEQ ID NO: 1510 - protein, 11 aa, Artificial Sequence
  Description of Artificial Sequence: Synthetic peptide
RASQSISSWLA

SEQ ID NO: 1511 - protein, 7 aa, Artificial Sequence
  Description of Artificial Sequence: Synthetic peptide
KASTLES

SEQ ID NO: 1512 - protein, 8 aa, Artificial Sequence
  Description of Artificial Sequence: Synthetic peptide
QQYNTYWT

SEQ ID NO: 1513 - protein, 5 aa, Artificial Sequence
  Description of Artificial Sequence: Synthetic peptide
PYNMM

SEQ ID NO: 1514 - protein, 17 aa, Artificial Sequence
  Description of Artificial Sequence: Synthetic peptide
SIWPSGGTTDYADSVKG

SEQ ID NO: 1515 - protein, 13 aa, Artificial Sequence
  Description of Artificial Sequence: Synthetic peptide
RRTGIPRRDAFDI

SEQ ID NO: 1516 - protein, 11 aa, Artificial Sequence
  Description of Artificial Sequence: Synthetic peptide
RASQSISSWLA

SEQ ID NO: 1517 - protein, 7 aa, Artificial Sequence
  Description of Artificial Sequence: Synthetic peptide
KASTLES

SEQ ID NO: 1518 - protein, 8 aa, Artificial Sequence
  Description of Artificial Sequence: Synthetic peptide
QQYNTYWT

SEQ ID NO: 1519 - protein, 5 aa, Artificial Sequence
  Description of Artificial Sequence: Synthetic peptide
VYSMH

SEQ ID NO: 1520 - protein, 17 aa, Artificial Sequence
  Description of Artificial Sequence: Synthetic peptide
VIGPSGGITLYADSVKG

SEQ ID NO: 1521 - protein, 13 aa, Artificial Sequence
  Description of Artificial Sequence: Synthetic peptide
RRTGIPRRDAFDI

SEQ ID NO: 1522 - protein, 11 aa, Artificial Sequence
  Description of Artificial Sequence: Synthetic peptide
RASQSISSWLA

SEQ ID NO: 1523 - protein, 7 aa, Artificial Sequence
  Description of Artificial Sequence: Synthetic peptide
KASTLES

SEQ ID NO: 1524 - protein, 8 aa, Artificial Sequence
  Description of Artificial Sequence: Synthetic peptide
QQYNTYWT

SEQ ID NO: 1525 - protein, 5 aa, Artificial Sequence
  Description of Artificial Sequence: Synthetic peptide
HYIMM

SEQ ID NO: 1526 - protein, 17 aa, Artificial Sequence
  Description of Artificial Sequence: Synthetic peptide
GIYSSGGITVYADSVKG

SEQ ID NO: 1527 - protein, 13 aa, Artificial Sequence
  Description of Artificial Sequence: Synthetic peptide
RRRGIPRRDAFDI

SEQ ID NO: 1528 - protein, 11 aa, Artificial Sequence
  Description of Artificial Sequence: Synthetic peptide
RASQSISSWLA

SEQ ID NO: 1529 - protein, 7 aa, Artificial Sequence
  Description of Artificial Sequence: Synthetic peptide
KASTLES

SEQ ID NO: 1530 - protein, 8 aa, Artificial Sequence
  Description of Artificial Sequence: Synthetic peptide
QQYNTYWT

SEQ ID NO: 1531 - protein, 5 aa, Artificial Sequence
  Description of Artificial Sequence: Synthetic peptide
HYIMM

SEQ ID NO: 1532 - protein, 17 aa, Artificial Sequence
  Description of Artificial Sequence: Synthetic peptide
GIYSSGGITVYADSVKG

SEQ ID NO: 1533 - protein, 13 aa, Artificial Sequence
  Description of Artificial Sequence: Synthetic peptide
RRMGIPRRNAFDI

SEQ ID NO: 1534 - protein, 11 aa, Artificial Sequence
  Description of Artificial Sequence: Synthetic peptide
RASQSISSWLA

SEQ ID NO: 1535 - protein, 7 aa, Artificial Sequence
  Description of Artificial Sequence: Synthetic peptide
KASTLES

SEQ ID NO: 1536 - protein, 8 aa, Artificial Sequence
  Description of Artificial Sequence: Synthetic peptide
QQYNTYWT

SEQ ID NO: 1537 - protein, 5 aa, Artificial Sequence
  Description of Artificial Sequence: Synthetic peptide
LYVMY

SEQ ID NO: 1538 - protein, 17 aa, Artificial Sequence
  Description of Artificial Sequence: Synthetic peptide
YIVPSGGPTAYADSVKG

SEQ ID NO: 1539 - protein, 13 aa, Artificial Sequence
  Description of Artificial Sequence: Synthetic peptide
RRTGIPRRDAFDI

SEQ ID NO: 1540 - protein, 11 aa, Artificial Sequence
  Description of Artificial Sequence: Synthetic peptide
RASQSISSWLA

SEQ ID NO: 1541 - protein, 7 aa, Artificial Sequence
  Description of Artificial Sequence: Synthetic peptide
KASTLES

SEQ ID NO: 1542 - protein, 8 aa, Artificial Sequence
  Description of Artificial Sequence: Synthetic peptide
QQYNTYWT

SEQ ID NO: 1543 - protein, 5 aa, Artificial Sequence
  Description of Artificial Sequence: Synthetic peptide
PYDML

SEQ ID NO: 1544 - protein, 17 aa, Artificial Sequence
  Description of Artificial Sequence: Synthetic peptide
YIVSSGGLTKYADSVKG

SEQ ID NO: 1545 - protein, 13 aa, Artificial Sequence
  Description of Artificial Sequence: Synthetic peptide
RRTGIPRRDAFDI

SEQ ID NO: 1546 - protein, 11 aa, Artificial Sequence
  Description of Artificial Sequence: Synthetic peptide
RASQSISSWLA

SEQ ID NO: 1547 - protein, 7 aa, Artificial Sequence
  Description of Artificial Sequence: Synthetic peptide
KASTLES

SEQ ID NO: 1548 - protein, 8 aa, Artificial Sequence
  Description of Artificial Sequence: Synthetic peptide
QQYNTYWT

SEQ ID NO: 1549 - protein, 5 aa, Artificial Sequence
  Description of Artificial Sequence: Synthetic peptide
QYTMV

SEQ ID NO: 1550 - protein, 15 aa, Artificial Sequence
  Description of Artificial Sequence: Synthetic peptide
WIYSSRANYADSVKG

SEQ ID NO: 1551 - protein, 13 aa, Artificial Sequence
  Description of Artificial Sequence: Synthetic peptide
RRTGIPRRDAFDI

SEQ ID NO: 1552 - protein, 11 aa, Artificial Sequence
  Description of Artificial Sequence: Synthetic peptide
RASQSISSWLA

SEQ ID NO: 1553 - protein, 7 aa, Artificial Sequence
  Description of Artificial Sequence: Synthetic peptide
KASTLES

SEQ ID NO: 1554 - protein, 8 aa, Artificial Sequence
  Description of Artificial Sequence: Synthetic peptide
QQYNTYWT

SEQ ID NO: 1555 - protein, 5 aa, Artificial Sequence
  Description of Artificial Sequence: Synthetic peptide
HYIMM

SEQ ID NO: 1556 - protein, 17 aa, Artificial Sequence
  Description of Artificial Sequence: Synthetic peptide
GIYSSGGITVYADSVKG

SEQ ID NO: 1557 - protein, 13 aa, Artificial Sequence
  Description of Artificial Sequence: Synthetic peptide
RRTGIPRRDAFDN

SEQ ID NO: 1558 - protein, 11 aa, Artificial Sequence
  Description of Artificial Sequence: Synthetic peptide
RASQSISSWLA

SEQ ID NO: 1559 - protein, 7 aa, Artificial Sequence
  Description of Artificial Sequence: Synthetic peptide
KASTLES

SEQ ID NO: 1560 - protein, 8 aa, Artificial Sequence
  Description of Artificial Sequence: Synthetic peptide
QQYNTYWT

SEQ ID NO: 1561 - protein, 5 aa, Artificial Sequence
  Description of Artificial Sequence: Synthetic peptide
HYIMM

SEQ ID NO: 1562 - protein, 17 aa, Artificial Sequence
  Description of Artificial Sequence: Synthetic peptide
GIYSSGGITVYADSVKG

SEQ ID NO: 1563 - protein, 13 aa, Artificial Sequence
  Description of Artificial Sequence: Synthetic peptide
RRTGIPRWDAFDI

SEQ ID NO: 1564 - protein, 11 aa, Artificial Sequence
  Description of Artificial Sequence: Synthetic peptide
RASQSISSWLA

SEQ ID NO: 1565 - protein, 7 aa, Artificial Sequence
  Description of Artificial Sequence: Synthetic peptide
KASTLES

SEQ ID NO: 1566 - protein, 8 aa, Artificial Sequence
  Description of Artificial Sequence: Synthetic peptide
QQYNTYWT

SEQ ID NO: 1567 - protein, 5 aa, Artificial Sequence
  Description of Artificial Sequence: Synthetic peptide
PYMMM

SEQ ID NO: 1568 - protein, 17 aa, Artificial Sequence
  Description of Artificial Sequence: Synthetic peptide
GIYPSGGYTVYADSVKG

SEQ ID NO: 1569 - protein, 13 aa, Artificial Sequence
  Description of Artificial Sequence: Synthetic peptide
RRTGIPRRDAFDI

SEQ ID NO: 1570 - protein, 11 aa, Artificial Sequence
  Description of Artificial Sequence: Synthetic peptide
RASQSISSWLA

SEQ ID NO: 1571 - protein, 7 aa, Artificial Sequence
  Description of Artificial Sequence: Synthetic peptide
KASTLES

SEQ ID NO: 1572 - protein, 8 aa, Artificial Sequence
  Description of Artificial Sequence: Synthetic peptide
QQYNTYWT

SEQ ID NO: 1573 - protein, 5 aa, Artificial Sequence
  Description of Artificial Sequence: Synthetic peptide
HYIMM

SEQ ID NO: 1574 - protein, 17 aa, Artificial Sequence
  Description of Artificial Sequence: Synthetic peptide
GIYSSGGITVYADSVKG

SEQ ID NO: 1575 - protein, 13 aa, Artificial Sequence
  Description of Artificial Sequence: Synthetic peptide
RRTGIPRRDAFEI

SEQ ID NO: 1576 - protein, 11 aa, Artificial Sequence
  Description of Artificial Sequence: Synthetic peptide
RASQSISSWLA

SEQ ID NO: 1577 - protein, 7 aa, Artificial Sequence
  Description of Artificial Sequence: Synthetic peptide
KASTLES

SEQ ID NO: 1578 - protein, 8 aa, Artificial Sequence
  Description of Artificial Sequence: Synthetic peptide
QQYNTYWT

SEQ ID NO: 1579 - protein, 5 aa, Artificial Sequence
  Description of Artificial Sequence: Synthetic peptide
NYSMD

SEQ ID NO: 1580 - protein, 17 aa, Artificial Sequence
  Description of Artificial Sequence: Synthetic peptide
RIYSSGGGTIYADSVKG

SEQ ID NO: 1581 - protein, 13 aa, Artificial Sequence
  Description of Artificial Sequence: Synthetic peptide
RRTGIPRRDAFDI

SEQ ID NO: 1582 - protein, 11 aa, Artificial Sequence
  Description of Artificial Sequence: Synthetic peptide
RASQSISSWLA

SEQ ID NO: 1583 - protein, 7 aa, Artificial Sequence
  Description of Artificial Sequence: Synthetic peptide
KASTLES

SEQ ID NO: 1584 - protein, 8 aa, Artificial Sequence
  Description of Artificial Sequence: Synthetic peptide
QQYNTYWT

SEQ ID NO: 1585 - protein, 5 aa, Artificial Sequence
  Description of Artificial Sequence: Synthetic peptide
HYVMM

SEQ ID NO: 1586 - protein, 17 aa, Artificial Sequence
  Description of Artificial Sequence: Synthetic peptide
YIVPSGGVTAYADSVKG

SEQ ID NO: 1587 - protein, 13 aa, Artificial Sequence
  Description of Artificial Sequence: Synthetic peptide
RRTGIPRRDAFDI

SEQ ID NO: 1588 - protein, 11 aa, Artificial Sequence
  Description of Artificial Sequence: Synthetic peptide
RASQSISSWLA

SEQ ID NO: 1589 - protein, 7 aa, Artificial Sequence
  Description of Artificial Sequence: Synthetic peptide
KASTLES

SEQ ID NO: 1590 - protein, 8 aa, Artificial Sequence
  Description of Artificial Sequence: Synthetic peptide
QQYNTYWT

SEQ ID NO: 1591 - protein, 5 aa, Artificial Sequence
  Description of Artificial Sequence: Synthetic peptide
HYIMM

SEQ ID NO: 1592 - protein, 17 aa, Artificial Sequence
  Description of Artificial Sequence: Synthetic peptide
GIYSSGGITVYADSVKG

SEQ ID NO: 1593 - protein, 13 aa, Artificial Sequence
  Description of Artificial Sequence: Synthetic peptide
RRTGIPRRDAFDS

SEQ ID NO: 1594 - protein, 11 aa, Artificial Sequence
  Description of Artificial Sequence: Synthetic peptide
RASQSISSWLA

SEQ ID NO: 1595 - protein, 7 aa, Artificial Sequence
  Description of Artificial Sequence: Synthetic peptide
KASTLES

SEQ ID NO: 1596 - protein, 8 aa, Artificial Sequence
  Description of Artificial Sequence: Synthetic peptide
QQYNTYWT

SEQ ID NO: 1597 - protein, 5 aa, Artificial Sequence
  Description of Artificial Sequence: Synthetic peptide
IYLMI

SEQ ID NO: 1598 - protein, 17 aa, Artificial Sequence
  Description of Artificial Sequence: Synthetic peptide
YIGPSGGPTEYADSVKG

SEQ ID NO: 1599 - protein, 13 aa, Artificial Sequence
  Description of Artificial Sequence: Synthetic peptide
RRTGIPRRDAFDI

SEQ ID NO: 1600 - protein, 11 aa, Artificial Sequence
  Description of Artificial Sequence: Synthetic peptide
RASQSISSWLA

SEQ ID NO: 1601 - protein, 7 aa, Artificial Sequence
  Description of Artificial Sequence: Synthetic peptide
KASTLES

SEQ ID NO: 1602 - protein, 8 aa, Artificial Sequence
  Description of Artificial Sequence: Synthetic peptide
QQYNTYWT

SEQ ID NO: 1603 - protein, 5 aa, Artificial Sequence
  Description of Artificial Sequence: Synthetic peptide
YYIMF

SEQ ID NO: 1604 - protein, 17 aa, Artificial Sequence
  Description of Artificial Sequence: Synthetic peptide
YISPSGGYTHYADSVKG

SEQ ID NO: 1605 - protein, 13 aa, Artificial Sequence
  Description of Artificial Sequence: Synthetic peptide
RRTGIPRRDAFDI

SEQ ID NO: 1606 - protein, 11 aa, Artificial Sequence
  Description of Artificial Sequence: Synthetic peptide
RASQSISSWLA

SEQ ID NO: 1607 - protein, 7 aa, Artificial Sequence
  Description of Artificial Sequence: Synthetic peptide
KASTLES

SEQ ID NO: 1608 - protein, 8 aa, Artificial Sequence
  Description of Artificial Sequence: Synthetic peptide
QQYNTYWT

SEQ ID NO: 1609 - protein, 5 aa, Artificial Sequence
  Description of Artificial Sequence: Synthetic peptide
HYIMM

SEQ ID NO: 1610 - protein, 17 aa, Artificial Sequence
  Description of Artificial Sequence: Synthetic peptide
GIYSSGGITVYADSVKG

SEQ ID NO: 1611 - protein, 13 aa, Artificial Sequence
  Description of Artificial Sequence: Synthetic peptide
RRTGIPRRDVFDI

SEQ ID NO: 1612 - protein, 11 aa, Artificial Sequence
  Description of Artificial Sequence: Synthetic peptide
RASQSISSWLA

SEQ ID NO: 1613 - protein, 7 aa, Artificial Sequence
  Description of Artificial Sequence: Synthetic peptide
KASTLES

SEQ ID NO: 1614 - protein, 8 aa, Artificial Sequence
  Description of Artificial Sequence: Synthetic peptide
QQYNTYWT

SEQ ID NO: 1615 - protein, 5 aa, Artificial Sequence
  Description of Artificial Sequence: Synthetic peptide
HYIMM

SEQ ID NO: 1616 - protein, 17 aa, Artificial Sequence
  Description of Artificial Sequence: Synthetic peptide
GIYSSGGITVYADSVKG

SEQ ID NO: 1617 - protein, 13 aa, Artificial Sequence
  Description of Artificial Sequence: Synthetic peptide
RRTGIPRRDSFDI

SEQ ID NO: 1618 - protein, 11 aa, Artificial Sequence
  Description of Artificial Sequence: Synthetic peptide
RASQSISSWLA

SEQ ID NO: 1619 - protein, 7 aa, Artificial Sequence
  Description of Artificial Sequence: Synthetic peptide
KASTLES

SEQ ID NO: 1620 - protein, 8 aa, Artificial Sequence
  Description of Artificial Sequence: Synthetic peptide
QQYNTYWT

SEQ ID NO: 1621 - protein, 5 aa, Artificial Sequence
  Description of Artificial Sequence: Synthetic peptide
TYAMV

SEQ ID NO: 1622 - protein, 17 aa, Artificial Sequence
  Description of Artificial Sequence: Synthetic peptide
SIYPSGGITTYADSVKG

SEQ ID NO: 1623 - protein, 13 aa, Artificial Sequence
  Description of Artificial Sequence: Synthetic peptide
RRTGIPRRDAFDI

SEQ ID NO: 1624 - protein, 11 aa, Artificial Sequence
  Description of Artificial Sequence: Synthetic peptide
RASQSISSWLA

SEQ ID NO: 1625 - protein, 7 aa, Artificial Sequence
  Description of Artificial Sequence: Synthetic peptide
KASTLES

SEQ ID NO: 1626 - protein, 8 aa, Artificial Sequence
  Description of Artificial Sequence: Synthetic peptide
QQYNTYWT

SEQ ID NO: 1627 - protein, 5 aa, Artificial Sequence
  Description of Artificial Sequence: Synthetic peptide
HYIMM

SEQ ID NO: 1628 - protein, 17 aa, Artificial Sequence
  Description of Artificial Sequence: Synthetic peptide
GIYSSGGITVYADSVKG

SEQ ID NO: 1629 - protein, 13 aa, Artificial Sequence
  Description of Artificial Sequence: Synthetic peptide
RRSGIPRRDAFDI

SEQ ID NO: 1630 - protein, 11 aa, Artificial Sequence
  Description of Artificial Sequence: Synthetic peptide
RASQSISSWLA

SEQ ID NO: 1631 - protein, 7 aa, Artificial Sequence
  Description of Artificial Sequence: Synthetic peptide
KASTLES

SEQ ID NO: 1632 - protein, 8 aa, Artificial Sequence
  Description of Artificial Sequence: Synthetic peptide
QQYNTYWT

SEQ ID NO: 1633 - protein, 5 aa, Artificial Sequence
  Description of Artificial Sequence: Synthetic peptide
PYTMI

SEQ ID NO: 1634 - protein, 17 aa, Artificial Sequence
  Description of Artificial Sequence: Synthetic peptide
SISSSGGMTPYADSVKG

SEQ ID NO: 1635 - protein, 13 aa, Artificial Sequence
  Description of Artificial Sequence: Synthetic peptide
RRTGIPRRDAFDI

SEQ ID NO: 1636 - protein, 107 aa, Artificial Sequence; identical to SEQ ID NO: 274
  Description of Artificial Sequence: Synthetic polypeptide

SEQ ID NO: 1637 - protein, 139 aa, Artificial Sequence
  Description of Artificial Sequence: Synthetic polypeptide
EVQLLESGGGLVQPGGSLRLSCAASGFTFSQYMMMWVRQAPGKGLEWVSGISSSGGHTDYADSVKGRFTISRDNSKNTLYLQMNSLRAEDTAVYYCAYRRTGIPRRDAFDIWGQGTMVTVSSASTKGPSVFPLAPSSKS

SEQ ID NO: 1638 - protein, 107 aa, Artificial Sequence; identical to SEQ ID NO: 274
  Description of Artificial Sequence: Synthetic polypeptide

SEQ ID NO: 1639 - protein, 139 aa, Artificial Sequence
  Description of Artificial Sequence: Synthetic polypeptide
EVQLLESGGGLVQPGGSLRLSCAASGFTFSPYMMMWVRQAPGKGLEWVSGIYPSGGYTVYADSVKGRFTISRDNSKNTLYLQMNSLRAEDTAVYYCAYRRTGIPRRDAFDIWGQGTMVTVSSASTKGPSVFPLAPSSKS

SEQ ID NO: 1640 - protein, 107 aa, Artificial Sequence; identical to SEQ ID NO: 274
  Description of Artificial Sequence: Synthetic polypeptide

SEQ ID NO: 1641 - protein, 139 aa, Artificial Sequence
  Description of Artificial Sequence: Synthetic polypeptide
EVQLLESGGGLVQPGGSLRLSCAASGFTFSPYLMWWVRQAPGKGLEWVSYIGPSGGPTHYADSVKGRFTISRDNSKNTLYLQMNSLRAEDTAVYYCAYRRTGIPRRDAFDIWGQGTMVTVSSASTKGPSVFPLAPSSKS

SEQ ID NO: 1642 - protein, 107 aa, Artificial Sequence; identical to SEQ ID NO: 274
  Description of Artificial Sequence: Synthetic polypeptide

SEQ ID NO: 1643 - protein, 139 aa, Artificial Sequence
  Description of Artificial Sequence: Synthetic polypeptide
EVQLLESGGGLVQPGGSLRLSCAASGFTFSKYWMYWVRQAPGKGLEWVSYIRPSGGQTYYADSVKGRFTISRDNSKNTLYLQMNSLRAEDTAVYYCAYRRTGIPRRDAFDIWGQGTMVTVSSASTKGPSVFPLAPSSKS

SEQ ID NO: 1644 - protein, 107 aa, Artificial Sequence; identical to SEQ ID NO: 274
  Description of Artificial Sequence: Synthetic polypeptide

SEQ ID NO: 1645 - protein, 138 aa, Artificial Sequence
  Description of Artificial Sequence: Synthetic polypeptide
EVQLLESGGGLVQPGGSLRLSCAASGFTFSMYQMFWVRQAPGKGLEWVSSISPGGGTQYADSVKGRFTISRDNSKNTLYLQMNSLRAEDTAVYYCAYRRTGIPRRDAFDIWGQGTMVTVSSASTKGPSVFPLAPSSKS

SEQ ID NO: 1646 - protein, 107 aa, Artificial Sequence; identical to SEQ ID NO: 274
  Description of Artificial Sequence: Synthetic polypeptide

SEQ ID NO: 1647 - protein, 139 aa, Artificial Sequence
  Description of Artificial Sequence: Synthetic polypeptide
EVQLLESGGGLVQPGGSLRLSCAASGFTFSIYGMFWVRQAPGKGLEWVSGIGPSGGPTKYADSVKGRFTISRDNSKNTLYLQMNSLRAEDTAVYYCAYRRTGIPRRDAFDIWGQGTMVTVSSASTKGPSVFPLAPSSKS

SEQ ID NO: 1648 - protein, 107 aa, Artificial Sequence; identical to SEQ ID NO: 274
  Description of Artificial Sequence: Synthetic polypeptide

SEQ ID NO: 1649 - protein, 139 aa, Artificial Sequence
  Description of Artificial Sequence: Synthetic polypeptide
EVQLLESGGGLVQPGGSLRLSCAASGFTFSYYIMFWVRQAPGKGLEWVSYISPSGGYTHYADSVKGRFTISRDNSKNTLYLQMNSLRAEDTAVYYCAYRRTGIPRRDAFDIWGQGTMVTVSSASTKGPSVFPLAPSSKS

SEQ ID NO: 1650 - protein, 107 aa, Artificial Sequence; identical to SEQ ID NO: 274
  Description of Artificial Sequence: Synthetic polypeptide

SEQ ID NO: 1651 - protein, 139 aa, Artificial Sequence
  Description of Artificial Sequence: Synthetic polypeptide
EVQLLESGGGLVQPGGSLRLSCAASGFTFSHYVMMWVRQAPGKGLEWVSYIVPSGGVTAYADSVKGRFTISRDNSKNTLYLQMNSLRAEDTAVYYCAYRRTGIPRRDAFDIWGQGTMVTVSSASTKGPSVFPLAPSSKS

SEQ ID NO: 1652 - protein, 107 aa, Artificial Sequence; identical to SEQ ID NO: 274
  Description of Artificial Sequence: Synthetic polypeptide

SEQ ID NO: 1653 - protein, 139 aa, Artificial Sequence
  Description of Artificial Sequence: Synthetic polypeptide
EVQLLESGGGLVQPGGSLRLSCAASGFTFSPYNMMWVRQAPGKGLEWVSSIWPSGGTTDYADSVKGRFTISRDNSKNTLYLQMNSLRAEDTAVYYCAYRRTGIPRRDAFDIWGQGTMVTVSSASTKGPSVFPLAPSSKS

SEQ ID NO: 1654 - protein, 107 aa, Artificial Sequence; identical to SEQ ID NO: 274
  Description of Artificial Sequence: Synthetic polypeptide

SEQ ID NO: 1655 - protein, 139 aa, Artificial Sequence
  Description of Artificial Sequence: Synthetic polypeptide
EVQLLESGGGLVQPGGSLRLSCAASGFTFSIYSMHWVRQAPGKGLEWVSSIYPSRGMTWYADSVKGRFTISRDNSKNTLYLQMNSLRAEDTAVYYCAYRRTGIPRRDAFDIWGQGTMVTVSSASTKGPSVFPLAPSSKS

SEQ ID NO: 1656 - protein, 107 aa, Artificial Sequence; identical to SEQ ID NO: 274
  Description of Artificial Sequence: Synthetic polypeptide

SEQ ID NO: 1657 - protein, 139 aa, Artificial Sequence
  Description of Artificial Sequence: Synthetic polypeptide
EVQLLESGGGLVQPGGSLRLSCAASGFTFSVYSMHWVRQAPGKGLEWVSVIGPSGGITLYADSVKGRFTISRDNSKNTLYLQMNSLRAEDTAVYYCAYRRTGIPRRDAFDIWGQGTMVTVSSASTKGPSVFPLAPSSKS

SEQ ID NO: 1658 - protein, 107 aa, Artificial Sequence; identical to SEQ ID NO: 274
  Description of Artificial Sequence: Synthetic polypeptide

SEQ ID NO: 1659 - protein, 139 aa, Artificial Sequence
  Description of Artificial Sequence: Synthetic polypeptide
EVQLLESGGGLVQPGGSLRLSCAASGFTFSRYSMRWVRQAPGKGLEWVSVIYPSGGQTYYADSVKGRFTISRDNSKNTLYLQMNSLRAEDTAVYYCAYRRTGIPRRDAFDIWGQGTMVTVSSASTKGPSVFPLAPSSKS

SEQ ID NO: 1660 - protein, 107 aa, Artificial Sequence; identical to SEQ ID NO: 274
  Description of Artificial Sequence: Synthetic polypeptide

SEQ ID NO: 1661 - protein, 139 aa, Artificial Sequence
  Description of Artificial Sequence: Synthetic polypeptide
EVQLLESGGGLVQPGGSLRLSCAASGFTFSNYSMDWVRQAPGKGLEWVSRIYSSGGGTIYADSVKGRFTISRDNSKNTLYLQMNSLRAEDTAVYYCAYRRTGIPRRDAFDIWGQGTMVTVSSASTKGPSVFPLAPSSKS

SEQ ID NO: 1662 - protein, 107 aa, Artificial Sequence; identical to SEQ ID NO: 274
  Description of Artificial Sequence: Synthetic polypeptide

SEQ ID NO: 1663 - protein, 138 aa, Artificial Sequence
  Description of Artificial Sequence: Synthetic polypeptide
EVQLLESGGGLVQPGGSLRLSCAASGFTFSRYVMWWVRQAPGKGLEWVSSISPSGDTHYADSVKGRFTISRDNSKNTLYLQMNSLRAEDTAVYYCAYRRTGIPRRDAFDIWGQGTMVTVSSASTKGPSVFPLAPSSKS

SEQ ID NO: 1664 - protein, 107 aa, Artificial Sequence; identical to SEQ ID NO: 274
  Description of Artificial Sequence: Synthetic polypeptide

SEQ ID NO: 1665 - protein, 139 aa, Artificial Sequence
  Description of Artificial Sequence: Synthetic polypeptide
EVQLLESGGGLVQPGGSLRLSCAASGFTFSIYDMIWVRQAPGKGLEWVSSIYPSGGNTSYADSVKGRFTISRDNSKNTLYLQMNSLRAEDTAVYYCAYRRTGIPRRDAFDIWGQGTMVTVSSASTKGPSVFPLAPSSKS

SEQ ID NO: 1666 - protein, 107 aa, Artificial Sequence; identical to SEQ ID NO: 274
  Description of Artificial Sequence: Synthetic polypeptide

SEQ ID NO: 1667 - protein, 139 aa, Artificial Sequence
  Description of Artificial Sequence: Synthetic polypeptide
EVQLLESGGGLVQPGGSLRLSCAASGFTFSIYSMQWVRQAPGKGLEWVSSIGSSGGKTLYADSVKGRFTISRDNSKNTLYLQMNSLRAEDTAVYYCAYRRTGIPRRDAFDIWGQGTMVTVSSASTKGPSVFPLAPSSKS

SEQ ID NO: 1668 - protein, 107 aa, Artificial Sequence; identical to SEQ ID NO: 274
  Description of Artificial Sequence: Synthetic polypeptide

SEQ ID NO: 1669 - protein, 139 aa, Artificial Sequence
  Description of Artificial Sequence: Synthetic polypeptide
EVQLLESGGGLVQPGGSLRLSCAASGFTFSVYNMHWVRQAPGKGLEWVSSIYPSGGMTTYADSVKGRFTISRDNSKNTLYLQMNSLRAEDTAVYYCAYRRTGIPRRDAFDIWGQGTMVTVSSASTKGPSVFPLAPSSKS

SEQ ID NO: 1670 - protein, 107 aa, Artificial Sequence; identical to SEQ ID NO: 274
  Description of Artificial Sequence: Synthetic polypeptide

SEQ ID NO: 1671 - protein, 139 aa, Artificial Sequence
  Description of Artificial Sequence: Synthetic polypeptide
EVQLLESGGGLVQPGGSLRLSCAASGFTFSPYDMLWVRQAPGKGLEWVSYIVSSGGLTKYADSVKGRFTISRDNSKNTLYLQMNSLRAEDTAVYYCAYRRTGIPRRDAFDIWGQGTMVTVSSASTKGPSVFPLAPSSKS

SEQ ID NO: 1672 - protein, 107 aa, Artificial Sequence; identical to SEQ ID NO: 274
  Description of Artificial Sequence: Synthetic polypeptide

SEQ ID NO: 1673 - protein, 139 aa, Artificial Sequence
  Description of Artificial Sequence: Synthetic polypeptide
EVQLLESGGGLVQPGGSLRLSCAASGFTFSTYTMRWVRQAPGKGLEWVSSIYPSGGKTQYADSVKGRFTISRDNSKNTLYLQMNSLRAEDTAVYYCAYRRTGIPRRDAFDIWGQGTMVTVSSASTKGPSVFPLAPSSKS

SEQ ID NO: 1674 - protein, 107 aa, Artificial Sequence; identical to SEQ ID NO: 274
  Description of Artificial Sequence: Synthetic polypeptide

SEQ ID NO: 1675 - protein, 139 aa, Artificial Sequence
  Description of Artificial Sequence: Synthetic polypeptide
EVQLLESGGGLVQPGGSLRLSCAASGFTFSIYHMYWVRQAPGKGLEWVSSIGPSGGPTGYADSVKGRFTISRDNSKNTLYLQMNSLRAEDTAVYYCAYRRTGIPRRDAFDIWGQGTMVTVSSASTKGPSVFPLAPSSKS

SEQ ID NO: 1676 - protein, 107 aa, Artificial Sequence; identical to SEQ ID NO: 274
  Description of Artificial Sequence: Synthetic polypeptide

SEQ ID NO: 1677 - protein, 139 aa, Artificial Sequence
  Description of Artificial Sequence: Synthetic polypeptide
EVQLLESGGGLVQPGGSLRLSCAASGFTFSIYSMFWVRQAPGKGLEWVSSIGPSGGVTHYADSVKGRFTISRDNSKNTLYLQMNSLRAEDTAVYYCAYRRTGIPRRDAFDIWGQGTMVTVSSASTKGPSVFPLAPSSKS

SEQ ID NO: 1678 - protein, 107 aa, Artificial Sequence; identical to SEQ ID NO: 274
  Description of Artificial Sequence: Synthetic polypeptide

SEQ ID NO: 1679 - protein, 139 aa, Artificial Sequence
  Description of Artificial Sequence: Synthetic polypeptide
EVQLLESGGGLVQPGGSLRLSCAASGFTFSVYAMRWVRQAPGKGLEWVSSIYPSGGKTWYADSVKGRFTISRDNSKNTLYLQMNSLRAEDTAVYYCAYRRTGIPRRDAFDIWGQGTMVTVSSASTKGPSVFPLAPSSKS

SEQ ID NO: 1680 - protein, 107 aa, Artificial Sequence; identical to SEQ ID NO: 274
  Description of Artificial Sequence: Synthetic polypeptide

SEQ ID NO: 1681 - protein, 139 aa, Artificial Sequence
  Description of Artificial Sequence: Synthetic polypeptide
EVQLLESGGGLVQPGGSLRLSCAASGFTFSTYAMVWVRQAPGKGLEWVSSIYPSGGITTYADSVKGRFTISRDNSKNTLYLQMNSLRAEDTAVYYCAYRRTGIPRRDAFDIWGQGTMVTVSSASTKGPSVFPLAPSSKS

SEQ ID NO: 1682 - protein, 107 aa, Artificial Sequence; identical to SEQ ID NO: 274
  Description of Artificial Sequence: Synthetic polypeptide

SEQ ID NO: 1683 - protein, 139 aa, Artificial Sequence
  Description of Artificial Sequence: Synthetic polypeptide
EVQLLESGGGLVQPGGSLRLSCAASGFTFSSYNMHWVRQAPGKGLEWVSSIVPSGGKTNYADSVKGRFTISRDNSKNTLYLQMNSLRAEDTAVYYCAYRRTGIPRRDAFDIWGQGTMVTVSSASTKGPSVFPLAPSSKS

SEQ ID NO: 1684 - protein, 107 aa, Artificial Sequence; identical to SEQ ID NO: 274
  Description of Artificial Sequence: Synthetic polypeptide

SEQ ID NO: 1685 - protein, 139 aa, Artificial Sequence
  Description of Artificial Sequence: Synthetic polypeptide
EVQLLESGGGLVQPGGSLRLSCAASGFTFSIYNMIWVRQAPGKGLEWVSSIYPSGGWTTYADSVKGRFTISRDNSKNTLYLQMNSLRAEDTAVYYCAYRRTGIPRRDAFDIWGQGTMVTVSSASTKGPSVFPLAPSSKS

SEQ ID NO: 1686 - protein, 107 aa, Artificial Sequence; identical to SEQ ID NO: 274
  Description of Artificial Sequence: Synthetic polypeptide

SEQ ID NO: 1687 - protein, 139 aa, Artificial Sequence
  Description of Artificial Sequence: Synthetic polypeptide
EVQLLESGGGLVQPGGSLRLSCAASGFTFSPYTMIWVRQAPGKGLEWVSSISSSGGMTPYADSVKGRFTISRDNSKNTLYLQMNSLRAEDTAVYYCAYRRTGIPRRDAFDIWGQGTMVTVSSASTKGPSVFPLAPSSKS

SEQ ID NO: 1688 - protein, 107 aa, Artificial Sequence; identical to SEQ ID NO: 274
  Description of Artificial Sequence: Synthetic polypeptide

SEQ ID NO: 1689 - protein, 139 aa, Artificial Sequence
  Description of Artificial Sequence: Synthetic polypeptide
EVQLLESGGGLVQPGGSLRLSCAASGFTFSRYSMIWVRQAPGKGLEWVSSIWSSGGATEYADSVKGRFTISRDNSKNTLYLQMNSLRAEDTAVYYCAYRRTGIPRRDAFDIWGQGTMVTVSSASTKGPSVFPLAPSSKS

SEQ ID NO: 1690 - protein, 107 aa, Artificial Sequence; identical to SEQ ID NO: 274
  Description of Artificial Sequence: Synthetic polypeptide

SEQ ID NO: 1691 - protein, 139 aa, Artificial Sequence
  Description of Artificial Sequence: Synthetic polypeptide
EVQLLESGGGLVQPGGSLRLSCAASGFTFSIYSMHWVRQAPGKGLEWVSSIYSSGGPTKYADSVKGRFTISRDNSKNTLYLQMNSLRAEDTAVYYCAYRRTGIPRRDAFDIWGQGTMVTVSSASTKGPSVFPLAPSSKS

SEQ ID NO: 1692 - protein, 107 aa, Artificial Sequence; identical to SEQ ID NO: 274
  Description of Artificial Sequence: Synthetic polypeptide

SEQ ID NO: 1693 - protein, 139 aa, Artificial Sequence
  Description of Artificial Sequence: Synthetic polypeptide
EVQLLESGGGLVQPGGSLRLSCAASGFTFSRYQMHWVRQAPGKGLEWVSWISPSGGITGYADSVKGRFTISRDNSKNTLYLQMNSLRAEDTAVYYCAYRRTGIPRRDAFDIWGQGTMVTVSSASTKGPSVFPLAPSSKS

SEQ ID NO: 1694 - protein, 107 aa, Artificial Sequence; identical to SEQ ID NO: 274
  Description of Artificial Sequence: Synthetic polypeptide

SEQ ID NO: 1695 - protein, 138 aa, Artificial Sequence
  Description of Artificial Sequence: Synthetic polypeptide
EVQLLESGGGLVQPGGSLRLSCAASGFTFSWYMMQWVRQAPGKGLEWVSRISPSGGTTYADSVKGRFTISRDNSKNTLYLQMNSLRAEDTAVYYCAYRRTGIPRRDAFDIWGQGTMVTVSSASTKGPSVFPLAPSSKS

SEQ ID NO: 1696 - protein, 107 aa, Artificial Sequence; identical to SEQ ID NO: 274
  Description of Artificial Sequence: Synthetic polypeptide

SEQ ID NO: 1697 - protein, 139 aa, Artificial Sequence
  Description of Artificial Sequence: Synthetic polypeptide
EVQLLESGGGLVQPGGSLRLSCAASGFTFSIYFMSWVRQAPGKGLEWVSSIRSSGGPTWYADSVKGRFTISRDNSKNTLYLQMNSLRAEDTAVYYCAYRRTGIPRRDAFDIWGQGTMVTVSSASTKGPSVFPLAPSSKS

SEQ ID NO: 1698 - protein, 107 aa, Artificial Sequence; identical to SEQ ID NO: 274
  Description of Artificial Sequence: Synthetic polypeptide

SEQ ID NO: 1699 - protein, 139 aa, Artificial Sequence
  Description of Artificial Sequence: Synthetic polypeptide
EVQLLESGGGLVQPGGSLRLSCAASGFTFSVYSMTWVRQAPGKGLEWVSSIGSSGGSTTYADSVKGRFTISRDNSKNTLYLQMNSLRAEDTAVYYCAYRRTGIPRRDAFDIWGQGTMVTVSSASTKGPSVFPLAPSSKS

SEQ ID NO: 1700 - protein, 107 aa, Artificial Sequence; identical to SEQ ID NO: 274
  Description of Artificial Sequence: Synthetic polypeptide

SEQ ID NO: 1701 - protein, 139 aa, Artificial Sequence
  Description of Artificial Sequence: Synthetic polypeptide
EVQLLESGGGLVQPGGSLRLSCAASGFTFSKYSMAWVRQAPGKGLEWVSGIYPSGGRTLYADSVKGRFTISRDNSKNTLYLQMNSLRAEDTAVYYCAYRRTGIPRRDAFDIWGQGTMVTVSSASTKGPSVFPLAPSSKS

SEQ ID NO: 1702 - protein, 107 aa, Artificial Sequence; identical to SEQ ID NO: 274
  Description of Artificial Sequence: Synthetic polypeptide

SEQ ID NO: 1703 - protein, 139 aa, Artificial Sequence
  Description of Artificial Sequence: Synthetic polypeptide
EVQLLESGGGLVQPGGSLRLSCAASGFTFSRYSMSWVRQAPGKGLEWVSGISPSGGETSYADSVKGRFTISRDNSKNTLYLQMNSLRAEDTAVYYCAYRRTGIPRRDAFDIWGQGTMVTVSSASTKGPSVFPLAPSSKS

SEQ ID NO: 1704 - protein, 107 aa, Artificial Sequence; identical to SEQ ID NO: 274
  Description of Artificial Sequence: Synthetic polypeptide

SEQ ID NO: 1705 - protein, 139 aa, Artificial Sequence
  Description of Artificial Sequence: Synthetic polypeptide
EVQLLESGGGLVQPGGSLRLSCAASGFTFSRYKMYWVRQAPGKGLEWVSVIGPSGGATFYADSVKGRFTISRDNSKNTLYLQMNSLRAEDTAVYYCAYRRTGIPRRDAFDIWGQGTMVTVSSASTKGPSVFPLAPSSKS

SEQ ID NO: 1706 - protein, 107 aa, Artificial Sequence; identical to SEQ ID NO: 274
  Description of Artificial Sequence: Synthetic polypeptide

SEQ ID NO: 1707 - protein, 139 aa, Artificial Sequence
  Description of Artificial Sequence: Synthetic polypeptide
EVQLLESGGGLVQPGGSLRLSCAASGFTFSQYFMHWVRQAPGKGLEWVSYIYPSGGMTEYADSVKGRFTISRDNSKNTLYLQMNSLRAEDTAVYYCAYRRTGIPRRDAFDIWGQGTMVTVSSASTKGPSVFPLAPSSKS

SEQ ID NO: 1708 - protein, 107 aa, Artificial Sequence; identical to SEQ ID NO: 274
  Description of Artificial Sequence: Synthetic polypeptide

SEQ ID NO: 1709 - protein, 139 aa, Artificial Sequence
  Description of Artificial Sequence: Synthetic polypeptide
EVQLLESGGGLVQPGGSLRLSCAASGFTFSIYTMYWVRQAPGKGLEWVSSISPSGGWTYYADSVKGRFTISRDNSKNTLYLQMNSLRAEDTAVYYCAYRRTGIPRRDAFDIWGQGTMVTVSSASTKGPSVFPLAPSSKS

SEQ ID NO: 1710 - protein, 107 aa, Artificial Sequence; identical to SEQ ID NO: 274
  Description of Artificial Sequence: Synthetic polypeptide

SEQ ID NO: 1711 - protein, 140 aa, Artificial Sequence
  Description of Artificial Sequence: Synthetic polypeptide
EVQLLESGGGLVQPGGSLRLSCAASGFTFSHYMGMNWVRQAPGKGLEWVSSIVPSGGWTQYADSVKGRFTISRDNSKNTLYLQMNSLRAEDTAVYYCAYRRTGIPRRDAFDIWGQGTMVTVSSASTKGPSVFPLAPSSKS

SEQ ID NO: 1712 - protein, 107 aa, Artificial Sequence; identical to SEQ ID NO: 274
  Description of Artificial Sequence: Synthetic polypeptide

SEQ ID NO: 1713 - protein, 139 aa, Artificial Sequence
  Description of Artificial Sequence: Synthetic polypeptide
EVQLLESGGGLVQPGGSLRLSCAASGFTFSLYVMYWVRQAPGKGLEWVSYIVPSGGPTAYADSVKGRFTISRDNSKNTLYLQMNSLRAEDTAVYYCAYRRTGIPRRDAFDIWGQGTMVTVSSASTKGPSVFPLAPSSKS

SEQ ID NO: 1714 - protein, 107 aa, Artificial Sequence; identical to SEQ ID NO: 274
  Description of Artificial Sequence: Synthetic polypeptide

SEQ ID NO: 1715 - protein, 139 aa, Artificial Sequence
  Description of Artificial Sequence: Synthetic polypeptide
EVQLLESGGGLVQPGGSLRLSCAASGFTFSIYSMYWVRQAPGKGLEWVSYIRPSGGNTKYADSVKGRFTISRDNSKNTLYLQMNSLRAEDTAVYYCAYRRTGIPRRDAFDIWGQGTMVTVSSASTKGPSVFPLAPSSKS

SEQ ID NO: 1716 - protein, 107 aa, Artificial Sequence; identical to SEQ ID NO: 274
  Description of Artificial Sequence: Synthetic polypeptide

SEQ ID NO: 1717 - protein, 139 aa, Artificial Sequence
  Description of Artificial Sequence: Synthetic polypeptide
EVQLLESGGGLVQPGGSLRLSCAASGFTFSIYDMNWVRQAPGKGLEWVSSIYPSGGRTRYADSVKGRFTISRDNSKNTLYLQMNSLRAEDTAVYYCAYRRTGIPRRDAFDIWGQGTMVTVSSASTKGPSVFPLAPSSKS

SEQ ID NO: 1718 - protein, 107 aa, Artificial Sequence; identical to SEQ ID NO: 274
  Description of Artificial Sequence: Synthetic polypeptide

SEQ ID NO: 1719 - protein, 139 aa, Artificial Sequence
  Description of Artificial Sequence: Synthetic polypeptide
EVQLLESGGGLVQPGGSLRLSCAASGFTFSTYSMYWVRQAPGKGLEWVSSIYPSGGLTWYADSVKGRFTISRDNSKNTLYLQMNSLRAEDTAVYYCAYRRTGIPRRDAFDIWGQGTMVTVSSASTKGPSVFPLAPSSKS

SEQ ID NO: 1720 - protein, 107 aa, Artificial Sequence; identical to SEQ ID NO: 274
  Description of Artificial Sequence: Synthetic polypeptide

SEQ ID NO: 1721 - protein, 139 aa, Artificial Sequence
  Description of Artificial Sequence: Synthetic polypeptide
EVQLLESGGGLVQPGGSLRLSCAASGFTFSIYDMWWVRQAPGKGLEWVSSIRPSGGITKYADSVKGRFTISRDNSKNTLYLQMNSLRAEDTAVYYCAYRRTGIPRRDAFDIWGQGTMVTVSSASTKGPSVFPLAPSSKS

SEQ ID NO: 1722 - protein, 107 aa, Artificial Sequence; identical to SEQ ID NO: 274
  Description of Artificial Sequence: Synthetic polypeptide

SEQ ID NO: 1723 - protein, 139 aa, Artificial Sequence
  Description of Artificial Sequence: Synthetic polypeptide
EVQLLESGGGLVQPGGSLRLSCAASGFTFSVYSMWWVRQAPGKGLEWVSSISSSGGMTEYADSVKGRFTISRDNSKNTLYLQMNSLRAEDTAVYYCAYRRTGIPRRDAFDIWGQGTMVTVSSASTKGPSVFPLAPSSKS

SEQ ID NO: 1724 - protein, 107 aa, Artificial Sequence; identical to SEQ ID NO: 274
  Description of Artificial Sequence: Synthetic polypeptide

SEQ ID NO: 1725 - protein, 139 aa, Artificial Sequence
  Description of Artificial Sequence: Synthetic polypeptide
EVQLLESGGGLVQPGGSLRLSCAASGFTFSVYNMHWVRQAPGKGLEWVSSIYPSGGMTYYADSVKGRFTISRDNSKNTLYLQMNSLRAEDTAVYYCAYRRTGIPRRDAFDIWGQGTMVTVSSASTKGPSVFPLAPSSKS

SEQ ID NO: 1726 - protein, 107 aa, Artificial Sequence; identical to SEQ ID NO: 274
  Description of Artificial Sequence: Synthetic polypeptide

SEQ ID NO: 1727 - protein, 139 aa, Artificial Sequence
  Description of Artificial Sequence: Synthetic polypeptide
EVQLLESGGGLVQPGGSLRLSCAASGFTFSIYTMMWVRQAPGKGLEWVSSIWSSGGQTKYADSVKGRFTISRDNSKNTLYLQMNSLRAEDTAVYYCAYRRTGIPRRDAFDIWGQGTMVTVSSASTKGPSVFPLAPSSKS

SEQ ID NO: 1728 - protein, 107 aa, Artificial Sequence; identical to SEQ ID NO: 274
  Description of Artificial Sequence: Synthetic polypeptide

SEQ ID NO: 1729 - protein, 137 aa, Artificial Sequence
  Description of Artificial Sequence: Synthetic polypeptide
EVQLLESGGGLVQPGGSLRLSCAASGFTFSQYTMVWVRQAPGKGLEWVSWIYSSRANYADSVKGRFTISRDNSKNTLYLQMNSLRAEDTAVYYCAYRRTGIPRRDAFDIWGQGTMVTVSSASTKGPSVFPLAPSSKS

SEQ ID NO: 1730 - protein, 107 aa, Artificial Sequence; identical to SEQ ID NO: 274
  Description of Artificial Sequence: Synthetic polypeptide

SEQ ID NO: 1731 - protein, 139 aa, Artificial Sequence
  Description of Artificial Sequence: Synthetic polypeptide
EVQLLESGGGLVQPGGSLRLSCAASGFTFSIYDMTWVRQAPGKGLEWVSSIYPSGGQTIYADSVKGRFTISRDNSKNTLYLQMNSLRAEDTAVYYCAYRRTGIPRRDAFDIWGQGTMVTVSSASTKGPSVFPLAPSSKS

SEQ ID NO: 1732 - protein, 107 aa, Artificial Sequence; identical to SEQ ID NO: 274
  Description of Artificial Sequence: Synthetic polypeptide

SEQ ID NO: 1733 - protein, 138 aa, Artificial Sequence
  Description of Artificial Sequence: Synthetic polypeptide
EVQLLESGGGLVQPGGSLRLSCAASGFTFSPYNMYWVRQAPGKGLEWVSWIVPGGVTKYADSVKGRFTISRDNSKNTLYLQMNSLRAEDTAVYYCAYRRTGIPRRDAFDIWGQGTMVTVSSASTKGPSVFPLAPSSKS

SEQ ID NO: 1734 - protein, 107 aa, Artificial Sequence; identical to SEQ ID NO: 274
  Description of Artificial Sequence: Synthetic polypeptide

SEQ ID NO: 1735 - protein, 139 aa, Artificial Sequence
  Description of Artificial Sequence: Synthetic polypeptide
EVQLLESGGGLVQPGGSLRLSCAASGFTFSIYDMYWVRQAPGKGLEWVSSIGPSGGPTAYADSVKGRFTISRDNSKNTLYLQMNSLRAEDTAVYYCAYRRTGIPRRDAFDIWGQGTMVTVSSASTKGPSVFPLAPSSKS

SEQ ID NO: 1736 - protein, 107 aa, Artificial Sequence; identical to SEQ ID NO: 274
  Description of Artificial Sequence: Synthetic polypeptide

SEQ ID NO: 1737 - protein, 139 aa, Artificial Sequence
  Description of Artificial Sequence: Synthetic polypeptide
EVQLLESGGGLVQPGGSLRLSCAASGFTFSIYLMIWVRQAPGKGLEWVSYIGPSGGPTEYADSVKGRFTISRDNSKNTLYLQMNSLRAEDTAVYYCAYRRTGIPRRDAFDIWGQGTMVTVSSASTKGPSVFPLAPSSKS

SEQ ID NO: 1738 - protein, 107 aa, Artificial Sequence; identical to SEQ ID NO: 274
  Description of Artificial Sequence: Synthetic polypeptide

SEQ ID NO: 1739 - protein, 139 aa, Artificial Sequence
  Description of Artificial Sequence: Synthetic polypeptide
EVQLLESGGGLVQPGGSLRLSCAASGFTFSHYIMMWVRQAPGKGLEWVSGIYSSGGITVYADSVKGRFTISRDNSKNTLYLQMNSLRAEDTAVYYCAYRRIGVPRRDEFDIWGQGTMVTVSSASTKGPSVFPLAPSSKS

SEQ ID NO: 1740 - protein, 107 aa, Artificial Sequence; identical to SEQ ID NO: 274
  Description of Artificial Sequence: Synthetic polypeptide

SEQ ID NO: 1741 - protein, 139 aa, Artificial Sequence
  Description of Artificial Sequence: Synthetic polypeptide
EVQLLESGGGLVQPGGSLRLSCAASGFTFSHYIMMWVRQAPGKGLEWVSGIYSSGGITVYADSVKGRFTISRDNSKNTLYLQMNSLRAEDTAVYYCAYRRRGIPRRDAFDIWGQGTMVTVSSASTKGPSVFPLAPSSKS

SEQ ID NO: 1742 - protein, 107 aa, Artificial Sequence; identical to SEQ ID NO: 274
  Description of Artificial Sequence: Synthetic polypeptide

SEQ ID NO: 1743 - protein, 139 aa, Artificial Sequence
  Description of Artificial Sequence: Synthetic polypeptide
EVQLLESGGGLVQPGGSLRLSCAASGFTFSHYIMMWVRQAPGKGLEWVSGIYSSGGITVYADSVKGRFTISRDNSKNTLYLQMNSLRAEDTAVYYCAFRRTGIPRRDAFDNWGQGTMVTVSSASTKGPSVFPLAPSSKS

SEQ ID NO: 1744 - protein, 107 aa, Artificial Sequence; identical to SEQ ID NO: 274
  Description of Artificial Sequence: Synthetic polypeptide

SEQ ID NO: 1745 - protein, 139 aa, Artificial Sequence
  Description of Artificial Sequence: Synthetic polypeptide
EVQLLESGGGLVQPGGSLRLSCAASGFTFSHYIMMWVRQAPGKGLEWVSGIYSSGGITVYADSVKGRFTISRDNSKNTLYLQMNSLRAEDTAVYYCAYRRTGVPRRDSFDIWGQGTMVTVSSASTKGPSVFPLAPSSKS

SEQ ID NO: 1746 - protein, 107 aa, Artificial Sequence; identical to SEQ ID NO: 274
  Description of Artificial Sequence: Synthetic polypeptide

SEQ ID NO: 1747 - protein, 139 aa, Artificial Sequence
  Description of Artificial Sequence: Synthetic polypeptide
EVQLLESGGGLVQPGGSLRLSCAASGFTFSHYIMMWVRQAPGKGLEWVSGIYSSGGITVYADSVKGRFTISRDNSKNTLYLQMNSLRAEDTAVYYCAYRRTGIPRRDAFDSWGQGTMVTVSSASTKGPSVFPLAPSSKS

SEQ ID NO: 1748 - protein, 107 aa, Artificial Sequence; identical to SEQ ID NO: 274
  Description of Artificial Sequence: Synthetic polypeptide

SEQ ID NO: 1749 - protein, 139 aa, Artificial Sequence
  Description of Artificial Sequence: Synthetic polypeptide
EVQLLESGGGLVQPGGSLRLSCAASGFTFSHYIMMWVRQAPGKGLEWVSGIYSSGGITVYADSVKGRFTISRDNSKNTLYLQMNSLRAEDTAVYYCAWRRIGVPRRDSFDMWGQGTMVTVSSASTKGPSVFPLAPSSKS

SEQ ID NO: 1750 - protein, 107 aa, Artificial Sequence; identical to SEQ ID NO: 274
  Description of Artificial Sequence: Synthetic polypeptide

SEQ ID NO: 1751 - protein, 139 aa, Artificial Sequence
  Description of Artificial Sequence: Synthetic polypeptide
EVQLLESGGGLVQPGGSLRLSCAASGFTFSHYIMMWVRQAPGKGLEWVSGIYSSGGITVYADSVKGRFTISRDNSKNTLYLQMNSLRAEDTAVYYCAYRRTGVPRRDAFDNWGQGTMVTVSSASTKGPSVFPLAPSSKS

SEQ ID NO: 1752 - protein, 107 aa, Artificial Sequence; identical to SEQ ID NO: 274
  Description of Artificial Sequence: Synthetic polypeptide

SEQ ID NO: 1753 - protein, 139 aa, Artificial Sequence
  Description of Artificial Sequence: Synthetic polypeptide
EVQLLESGGGLVQPGGSLRLSCAASGFTFSHYIMMWVRQAPGKGLEWVSGIYSSGGITVYADSVKGRFTISRDNSKNTLYLQMNSLRAEDTAVYYCAYRRMGIPRRNAFDIWGQGTMVTVSSASTKGPSVFPLAPSSKS

SEQ ID NO: 1754 - protein, 107 aa, Artificial Sequence; identical to SEQ ID NO: 274
  Description of Artificial Sequence: Synthetic polypeptide

SEQ ID NO: 1755 - protein, 139 aa, Artificial Sequence
  Description of Artificial Sequence: Synthetic polypeptide
EVQLLESGGGLVQPGGSLRLSCAASGFTFSHYIMMWVRQAPGKGLEWVSGIYSSGGITVYADSVKGRFTISRDNSKNTLYLQMNSLRAEDTAVYYCAYRRTGVPRRNAFDNWGQGTMVTVSSASTKGPSVFPLAPSSKS

SEQ ID NO: 1756 - protein, 107 aa, Artificial Sequence; identical to SEQ ID NO: 274
  Description of Artificial Sequence: Synthetic polypeptide

SEQ ID NO: 1757 - protein, 139 aa, Artificial Sequence
  Description of Artificial Sequence: Synthetic polypeptide
EVQLLESGGGLVQPGGSLRLSCAASGFTFSHYIMMWVRQAPGKGLEWVSGIYSSGGITVYADSVKGRFTISRDNSKNTLYLQMNSLRAEDTAVYYCAYRRTGIPRRDVFDIWGQGTMVTVSSASTKGPSVFPLAPSSKS

SEQ ID NO: 1758 - protein, 107 aa, Artificial Sequence; identical to SEQ ID NO: 274
  Description of Artificial Sequence: Synthetic polypeptide

SEQ ID NO: 1759 - protein, 139 aa, Artificial Sequence
  Description of Artificial Sequence: Synthetic polypeptide
EVQLLESGGGLVQPGGSLRLSCAASGFTFSHYIMMWVRQAPGKGLEWVSGIYSSGGITVYADSVKGRFTISRDNSKNTLYLQMNSLRAEDTAVYYCAYRRTGVPRRDEFDIWGQGTMVTVSSASTKGPSVFPLAPSSKS

SEQ ID NO: 1760 - protein, 107 aa, Artificial Sequence; identical to SEQ ID NO: 274
  Description of Artificial Sequence: Synthetic polypeptide

SEQ ID NO: 1761 - protein, 139 aa, Artificial Sequence
  Description of Artificial Sequence: Synthetic polypeptide
EVQLLESGGGLVQPGGSLRLSCAASGFTFSHYIMMWVRQAPGKGLEWVSGIYSSGGITVYADSVKGRFTISRDNSKNTLYLQMNSLRAEDTAVYYCAYRRSGIPRRDAFDIWGQGTMVTVSSASTKGPSVFPLAPSSKS

SEQ ID NO: 1762 - protein, 107 aa, Artificial Sequence; identical to SEQ ID NO: 274
  Description of Artificial Sequence: Synthetic polypeptide

SEQ ID NO: 1763 - protein, 139 aa, Artificial Sequence
  Description of Artificial Sequence: Synthetic polypeptide
EVQLLESGGGLVQPGGSLRLSCAASGFTFSHYIMMWVRQAPGKGLEWVSGIYSSGGITVYADSVKGRFTISRDNSKNTLYLQMNSLRAEDTAVYYCAYRRTGVPRRDAFDIWGQGTMVTVSSASTKGPSVFPLAPSSKS

SEQ ID NO: 1764 - protein, 107 aa, Artificial Sequence; identical to SEQ ID NO: 274
  Description of Artificial Sequence: Synthetic polypeptide

SEQ ID NO: 1765 - protein, 139 aa, Artificial Sequence
  Description of Artificial Sequence: Synthetic polypeptide
EVQLLESGGGLVQPGGSLRLSCAASGFTFSHYIMMWVRQAPGKGLEWVSGIYSSGGITVYADSVKGRFTISRDNSKNTLYLQMNSLRAEDTAVYYCAYRRTGVPRRDALDNWGQGTMVTVSSASTKGPSVFPLAPSSKS

SEQ ID NO: 1766 - protein, 107 aa, Artificial Sequence; identical to SEQ ID NO: 274
  Description of Artificial Sequence: Synthetic polypeptide

SEQ ID NO: 1767 - protein, 139 aa, Artificial Sequence
  Description of Artificial Sequence: Synthetic polypeptide
EVQLLESGGGLVQPGGSLRLSCAASGFTFSHYIMMWVRQAPGKGLEWVSGIYSSGGITVYADSVKGRFTISRDNSKNTLYLQMNSLRAEDTAVYYCAYRRIGVPRRDAFDIWGQGTMVTVSSASTKGPSVFPLAPSSKS

SEQ ID NO: 1768 - protein, 107 aa, Artificial Sequence; identical to SEQ ID NO: 274
  Description of Artificial Sequence: Synthetic polypeptide

SEQ ID NO: 1769 - protein, 139 aa, Artificial Sequence
  Description of Artificial Sequence: Synthetic polypeptide
EVQLLESGGGLVQPGGSLRLSCAASGFTFSHYIMMWVRQAPGKGLEWVSGIYSSGGITVYADSVKGRFTISRDNSKNTLYLQMNSLRAEDTAVYYCAYRRKGIPRRDDFDIWGQGTMVTVSSASTKGPSVFPLAPSSKS

SEQ ID NO: 1770 - protein, 107 aa, Artificial Sequence; identical to SEQ ID NO: 274
  Description of Artificial Sequence: Synthetic polypeptide

SEQ ID NO: 1771 - protein, 139 aa, Artificial Sequence
  Description of Artificial Sequence: Synthetic polypeptide
EVQLLESGGGLVQPGGSLRLSCAASGFTFSHYIMMWVRQAPGKGLEWVSGIYSSGGITVYADSVKGRFTISRDNSKNTLYLQMNSLRAEDTAVYYCAYRRTGIPRWDAFDIWGQGTMVTVSSASTKGPSVFPLAPSSKS

SEQ ID NO: 1772 - protein, 107 aa, Artificial Sequence; identical to SEQ ID NO: 274
  Description of Artificial Sequence: Synthetic polypeptide

SEQ ID NO: 1773 - protein, 139 aa, Artificial Sequence
  Description of Artificial Sequence: Synthetic polypeptide
EVQLLESGGGLVQPGGSLRLSCAASGFTFSHYIMMWVRQAPGKGLEWVSGIYSSGGITVYADSVKGRFTISRDNSKNTLYLQMNSLRAEDTAVYYCAFRRTGIPRRDSFDIWGQGTMVTVSSASTKGPSVFPLAPSSKS

SEQ ID NO: 1774 - protein, 107 aa, Artificial Sequence; identical to SEQ ID NO: 274
  Description of Artificial Sequence: Synthetic polypeptide

SEQ ID NO: 1775 - protein, 139 aa, Artificial Sequence
  Description of Artificial Sequence: Synthetic polypeptide
EVQLLESGGGLVQPGGSLRLSCAASGFTFSHYIMMWVRQAPGKGLEWVSGIYSSGGITVYADSVKGRFTISRDNSKNTLYLQMNSLRAEDTAVYYCAYQRTGVPRRDSFNIWGQGTMVTVSSASTKGPSVFPLAPSSKS

SEQ ID NO: 1776 - protein, 107 aa, Artificial Sequence; identical to SEQ ID NO: 274
  Description of Artificial Sequence: Synthetic polypeptide

SEQ ID NO: 1777 - protein, 139 aa, Artificial Sequence
  Description of Artificial Sequence: Synthetic polypeptide
EVQLLESGGGLVQPGGSLRLSCAASGFTFSHYIMMWVRQAPGKGLEWVSGIYSSGGITVYADSVKGRFTISRDNSKNTLYLQMNSLRAEDTAVYYCAYRRTGVPRRDDFDIWGQGTMVTVSSASTKGPSVFPLAPSSKS

SEQ ID NO: 1778 - protein, 107 aa, Artificial Sequence; identical to SEQ ID NO: 274
  Description of Artificial Sequence: Synthetic polypeptide

SEQ ID NO: 1779 - protein, 139 aa, Artificial Sequence
  Description of Artificial Sequence: Synthetic polypeptide
EVQLLESGGGLVQPGGSLRLSCAASGFTFSHYIMMWVRQAPGKGLEWVSGIYSSGGITVYADSVKGRFTISRDNSKNTLYLQMNSLRAEDTAVYYCAYRRSGVPRRDDFDIWGQGTMVTVSSASTKGPSVFPLAPSSKS

SEQ ID NO: 1780 - protein, 107 aa, Artificial Sequence; identical to SEQ ID NO: 274
  Description of Artificial Sequence: Synthetic polypeptide

SEQ ID NO: 1781 - protein, 139 aa, Artificial Sequence
  Description of Artificial Sequence: Synthetic polypeptide
EVQLLESGGGLVQPGGSLRLSCAASGFTFSHYIMMWVRQAPGKGLEWVSGIYSSGGITVYADSVKGRFTISRDNSKNTLYLQMNSLRAEDTAVYYCAYRRTGVPRWDDFDIWGQGTMVTVSSASTKGPSVFPLAPSSKS

SEQ ID NO: 1782 - protein, 107 aa, Artificial Sequence; identical to SEQ ID NO: 274
  Description of Artificial Sequence: Synthetic polypeptide

SEQ ID NO: 1783 - protein, 139 aa, Artificial Sequence
  Description of Artificial Sequence: Synthetic polypeptide
EVQLLESGGGLVQPGGSLRLSCAASGFTFSHYIMMWVRQAPGKGLEWVSGIYSSGGITVYADSVKGRFTISRDNSKNTLYLQMNSLRAEDTAVYYCAYRRPGVPRRDAFDIWGQGTMVTVSSASTKGPSVFPLAPSSKS

SEQ ID NO: 1784 - protein, 107 aa, Artificial Sequence; identical to SEQ ID NO: 274
  Description of Artificial Sequence: Synthetic polypeptide

SEQ ID NO: 1785 - protein, 139 aa, Artificial Sequence
  Description of Artificial Sequence: Synthetic polypeptide
EVQLLESGGGLVQPGGSLRLSCAASGFTFSHYIMMWVRQAPGKGLEWVSGIYSSGGITVYADSVKGRFTISRDNSKNTLYLQMNSLRAEDTAVYYCAYRRIGVPRRDDFDIWGQGTMVTVSSASTKGPSVFPLAPSSKS

SEQ ID NO: 1786 - protein, 107 aa, Artificial Sequence; identical to SEQ ID NO: 274
  Description of Artificial Sequence: Synthetic polypeptide

SEQ ID NO: 1787 - protein, 139 aa, Artificial Sequence
  Description of Artificial Sequence: Synthetic polypeptide
EVQLLESGGGLVQPGGSLRLSCAASGFTFSHYIMMWVRQAPGKGLEWVSGIYSSGGITVYADSVKGRFTISRDNSKNTLYLQMNSLRAEDTAVYYCAYRRIGVPRRDSFDIWGQGTMVTVSSASTKGPSVFPLAPSSKS

SEQ ID NO: 1788 - protein, 107 aa, Artificial Sequence; identical to SEQ ID NO: 274
  Description of Artificial Sequence: Synthetic polypeptide

SEQ ID NO: 1789 - protein, 139 aa, Artificial Sequence
  Description of Artificial Sequence: Synthetic polypeptide
EVQLLESGGGLVQPGGSLRLSCAASGFTFSHYIMMWVRQAPGKGLEWVSGIYSSGGITVYADSVKGRFTISRDNSKNTLYLQMNSLRAEDTAVYYCAYRRTGIPRRDAFEIWGQGTMVTVSSASTKGPSVFPLAPSSKS

SEQ ID NO: 1790 - protein, 107 aa, Artificial Sequence; identical to SEQ ID NO: 274
  Description of Artificial Sequence: Synthetic polypeptide

SEQ ID NO: 1791 - protein, 139 aa, Artificial Sequence
  Description of Artificial Sequence: Synthetic polypeptide
EVQLLESGGGLVQPGGSLRLSCAASGFTFSHYIMMWVRQAPGKGLEWVSGIYSSGGITVYADSVKGRFTISRDNSKNTLYLQMNSLRAEDTAVYYCAYRRRGVPRRDDFDIWGQGTMVTVSSASTKGPSVFPLAPSSKS

SEQ ID NO: 1792 - protein, 107 aa, Artificial Sequence; identical to SEQ ID NO: 274
  Description of Artificial Sequence: Synthetic polypeptide

SEQ ID NO: 1793 - protein, 139 aa, Artificial Sequence
  Description of Artificial Sequence: Synthetic polypeptide
EVQLLESGGGLVQPGGSLRLSCAASGFTFSHYIMMWVRQAPGKGLEWVSGIYSSGGITVYADSVKGRFTISRDNSKNTLYLQMNSLRAEDTAVYYCAYRRTGVPRWDAFDIWGQGTMVTVSSASTKGPSVFPLAPSSKS

SEQ ID NO: 1794 - protein, 107 aa, Artificial Sequence; identical to SEQ ID NO: 274
  Description of Artificial Sequence: Synthetic polypeptide

SEQ ID NO: 1795 - protein, 139 aa, Artificial Sequence
  Description of Artificial Sequence: Synthetic polypeptide
EVQLLESGGGLVQPGGSLRLSCAASGFTFSHYIMMWVRQAPGKGLEWVSGIYSSGGITVYADSVKGRFTISRDNSKNTLYLQMNSLRAEDTAVYYCAFRRTGVPRRDSFEIWGQGTMVTVSSASTKGPSVFPLAPSSKS

SEQ ID NO: 1796 - protein, 107 aa, Artificial Sequence; identical to SEQ ID NO: 274
  Description of Artificial Sequence: Synthetic polypeptide

SEQ ID NO: 1797 - protein, 139 aa, Artificial Sequence
  Description of Artificial Sequence: Synthetic polypeptide
EVQLLESGGGLVQPGGSLRLSCAASGFTFSHYIMMWVRQAPGKGLEWVSGIYSSGGITVYADSVKGRFTISRDNSKNTLYLQMNSLRAEDTAVYYCAFRRTGVPRWDDFDIWGQGTMVTVSSASTKGPSVFPLAPSSKS

SEQ ID NO: 1798 - protein, 107 aa, Artificial Sequence; identical to SEQ ID NO: 274
  Description of Artificial Sequence: Synthetic polypeptide

SEQ ID NO: 1799 - protein, 139 aa, Artificial Sequence
  Description of Artificial Sequence: Synthetic polypeptide
EVQLLESGGGLVQPGGSLRLSCAASGFTFSHYIMMWVRQAPGKGLEWVSGIYSSGGITVYADSVKGRFTISRDNSKNTLYLQMNSLRAEDTAVYYCAFRRTGVPRRDVFDIWGQGTMVTVSSASTKGPSVFPLAPSSKS

SEQ ID NO: 1800 - protein, 12 aa, Artificial Sequence
  Description of Artificial Sequence: Synthetic peptide
RTSQFVNSNYLA

SEQ ID NO: 1801 - protein, 7 aa, Artificial Sequence
  Description of Artificial Sequence: Synthetic peptide
GASSRAT

SEQ ID NO: 1802 - protein, 9 aa, Artificial Sequence
  Description of Artificial Sequence: Synthetic peptide
QQSSRTPWT

SEQ ID NO: 1803 - protein, 5 aa, Artificial Sequence
  Description of Artificial Sequence: Synthetic peptide
HYLMT

SEQ ID NO: 1804 - protein, 17 aa, Artificial Sequence
  Description of Artificial Sequence: Synthetic peptide
YISPSGGHTIYADSVKG

SEQ ID NO: 1805 - protein, 16 aa, Artificial Sequence
  Description of Artificial Sequence: Synthetic peptide
VARGIAARSRTSYLDQ

SEQ ID NO: 1806 - protein, 12 aa, Artificial Sequence
  Description of Artificial Sequence: Synthetic peptide
RTSQFVNSNYLA

SEQ ID NO: 1807 - protein, 7 aa, Artificial Sequence
  Description of Artificial Sequence: Synthetic peptide
GASSRAT

SEQ ID NO: 1808 - protein, 9 aa, Artificial Sequence
  Description of Artificial Sequence: Synthetic peptide
QQSSRTPWT

SEQ ID NO: 1809 - protein, 5 aa, Artificial Sequence
  Description of Artificial Sequence: Synthetic peptide
HYLMT

SEQ ID NO: 1810 - protein, 17 aa, Artificial Sequence
  Description of Artificial Sequence: Synthetic peptide
YISPSGGHTIYADSVKG

SEQ ID NO: 1811 - protein, 16 aa, Artificial Sequence
  Description of Artificial Sequence: Synthetic peptide
VGQGIRGRSRTSYFAQ

SEQ ID NO: 1812 - protein, 12 aa, Artificial Sequence
  Description of Artificial Sequence: Synthetic peptide
RTSQFVNSNYLA

SEQ ID NO: 1813 - protein, 7 aa, Artificial Sequence
  Description of Artificial Sequence: Synthetic peptide
GASSRAT

SEQ ID NO: 1814 - protein, 9 aa, Artificial Sequence
  Description of Artificial Sequence: Synthetic peptide
QQSSRTPWT

SEQ ID NO: 1815 - protein, 5 aa, Artificial Sequence
  Description of Artificial Sequence: Synthetic peptide
DYMMA

SEQ ID NO: 1816 - protein, 17 aa, Artificial Sequence
  Description of Artificial Sequence: Synthetic peptide
SIVPSGGHTHYADSVKG

SEQ ID NO: 1817 - protein, 16 aa, Artificial Sequence
  Description of Artificial Sequence: Synthetic peptide
VARGIAARSRTSYFDY

SEQ ID NO: 1818 - protein, 12 aa, Artificial Sequence
  Description of Artificial Sequence: Synthetic peptide
RTSQFVNSNYLA

SEQ ID NO: 1819 - protein, 7 aa, Artificial Sequence
  Description of Artificial Sequence: Synthetic peptide
GASSRAT

SEQ ID NO: 1820 - protein, 9 aa, Artificial Sequence
  Description of Artificial Sequence: Synthetic peptide
QQSSRTPWT

SEQ ID NO: 1821 - protein, 5 aa, Artificial Sequence
  Description of Artificial Sequence: Synthetic peptide
HYLMT

SEQ ID NO: 1822 - protein, 17 aa, Artificial Sequence
  Description of Artificial Sequence: Synthetic peptide
YISPSGGHTIYADSVKG

SEQ ID NO: 1823 - protein, 16 aa, Artificial Sequence
  Description of Artificial Sequence: Synthetic peptide
VAQGIAARSRTSSVDQ

SEQ ID NO: 1824 - protein, 12 aa, Artificial Sequence
  Description of Artificial Sequence: Synthetic peptide
RTSQFVNSNYLA

SEQ ID NO: 1825 - protein, 7 aa, Artificial Sequence
  Description of Artificial Sequence: Synthetic peptide
GASSRAT

SEQ ID NO: 1826 - protein, 9 aa, Artificial Sequence
  Description of Artificial Sequence: Synthetic peptide
QQSSRTPWT

SEQ ID NO: 1827 - protein, 5 aa, Artificial Sequence
  Description of Artificial Sequence: Synthetic peptide
HYLMT

SEQ ID NO: 1828 - protein, 17 aa, Artificial Sequence
  Description of Artificial Sequence: Synthetic peptide
YISPSGGHTIYADSVKG

SEQ ID NO: 1829 - protein, 16 aa, Artificial Sequence
  Description of Artificial Sequence: Synthetic peptide
VARGIAARSRTSFFDY

SEQ ID NO: 1830 - protein, 12 aa, Artificial Sequence
  Description of Artificial Sequence: Synthetic peptide
RTSQFVNSNYLA

SEQ ID NO: 1831 - protein, 7 aa, Artificial Sequence
  Description of Artificial Sequence: Synthetic peptide
GASSRAT

SEQ ID NO: 1832 - protein, 9 aa, Artificial Sequence
  Description of Artificial Sequence: Synthetic peptide
QQSSRTPWT

SEQ ID NO: 1833 - protein, 5 aa, Artificial Sequence
  Description of Artificial Sequence: Synthetic peptide
QYLMA

SEQ ID NO: 1834 - protein, 17 aa, Artificial Sequence
  Description of Artificial Sequence: Synthetic peptide
SIYPSGGWTKYADSVKG

SEQ ID NO: 1835 - protein, 16 aa, Artificial Sequence
  Description of Artificial Sequence: Synthetic peptide
VARGIAARSRTSYFDY

SEQ ID NO: 1836 - protein, 12 aa, Artificial Sequence
  Description of Artificial Sequence: Synthetic peptide
RTSQFVNSNYLA

SEQ ID NO: 1837 - protein, 7 aa, Artificial Sequence
  Description of Artificial Sequence: Synthetic peptide
GASSRAT

SEQ ID NO: 1838 - protein, 9 aa, Artificial Sequence
  Description of Artificial Sequence: Synthetic peptide
QQSSRTPWT

SEQ ID NO: 1839 - protein, 5 aa, Artificial Sequence
  Description of Artificial Sequence: Synthetic peptide
HYLMT

SEQ ID NO: 1840 - protein, 17 aa, Artificial Sequence
  Description of Artificial Sequence: Synthetic peptide
YISPSGGHTIYADSVKG

SEQ ID NO: 1841 - protein, 16 aa, Artificial Sequence
  Description of Artificial Sequence: Synthetic peptide
VARGIASRSRTRYCDY

SEQ ID NO: 1842 - protein, 12 aa, Artificial Sequence
  Description of Artificial Sequence: Synthetic peptide
RTSQFVNSNYLA

SEQ ID NO: 1843 - protein, 7 aa, Artificial Sequence
  Description of Artificial Sequence: Synthetic peptide
GASSRAT

SEQ ID NO: 1844 - protein, 9 aa, Artificial Sequence
  Description of Artificial Sequence: Synthetic peptide
QQSSRTPWT

SEQ ID NO: 1845 - protein, 5 aa, Artificial Sequence
  Description of Artificial Sequence: Synthetic peptide
HYLMT

SEQ ID NO: 1846 - protein, 17 aa, Artificial Sequence
  Description of Artificial Sequence: Synthetic peptide
YISPSGGHTIYADSVKG

SEQ ID NO: 1847 - protein, 16 aa, Artificial Sequence
  Description of Artificial Sequence: Synthetic peptide
VATGIVARSRTRYFDQ

SEQ ID NO: 1848 - protein, 12 aa, Artificial Sequence
  Description of Artificial Sequence: Synthetic peptide
RTSQFVNSNYLA

SEQ ID NO: 1849 - protein, 7 aa, Artificial Sequence
  Description of Artificial Sequence: Synthetic peptide
GASSRAT

SEQ ID NO: 1850 - protein, 9 aa, Artificial Sequence
  Description of Artificial Sequence: Synthetic peptide
QQSSRTPWT

SEQ ID NO: 1851 - protein, 5 aa, Artificial Sequence
  Description of Artificial Sequence: Synthetic peptide
HYLMT

SEQ ID NO: 1852 - protein, 17 aa, Artificial Sequence
  Description of Artificial Sequence: Synthetic peptide
YISPSGGHTIYADSVKG

SEQ ID NO: 1853 - protein, 16 aa, Artificial Sequence
  Description of Artificial Sequence: Synthetic peptide
VARGIAARSRTRYFDY

SEQ ID NO: 1854 - protein, 12 aa, Artificial Sequence
  Description of Artificial Sequence: Synthetic peptide
RTSQFVNSNYLA

SEQ ID NO: 1855 - protein, 7 aa, Artificial Sequence
  Description of Artificial Sequence: Synthetic peptide
GASSRAT

SEQ ID NO: 1856 - protein, 9 aa, Artificial Sequence
  Description of Artificial Sequence: Synthetic peptide
QQSSRTPWT

SEQ ID NO: 1857 - protein, 5 aa, Artificial Sequence
  Description of Artificial Sequence: Synthetic peptide
HYLMT

SEQ ID NO: 1858 - protein, 17 aa, Artificial Sequence
  Description of Artificial Sequence: Synthetic peptide
YISPSGGHTIYADSVKG

SEQ ID NO: 1859 - protein, 16 aa, Artificial Sequence
  Description of Artificial Sequence: Synthetic peptide
VAQGISARSRTSYFDY

SEQ ID NO: 1860 - protein, 12 aa, Artificial Sequence
  Description of Artificial Sequence: Synthetic peptide
RTSQFVNSNYLA

SEQ ID NO: 1861 - protein, 7 aa, Artificial Sequence
  Description of Artificial Sequence: Synthetic peptide
GASSRAT

SEQ ID NO: 1862 - protein, 9 aa, Artificial Sequence
  Description of Artificial Sequence: Synthetic peptide
QQSSRTPWT

SEQ ID NO: 1863 - protein, 5 aa, Artificial Sequence
  Description of Artificial Sequence: Synthetic peptide
HYLMT

SEQ ID NO: 1864 - protein, 17 aa, Artificial Sequence
  Description of Artificial Sequence: Synthetic peptide
YISPSGGHTIYADSVKG

SEQ ID NO: 1865 - protein, 16 aa, Artificial Sequence
  Description of Artificial Sequence: Synthetic peptide
VAQGIVARSRTSYLHQ

SEQ ID NO: 1866 - protein, 12 aa, Artificial Sequence
  Description of Artificial Sequence: Synthetic peptide
RTSQFVNSNYLA

SEQ ID NO: 1867 - protein, 7 aa, Artificial Sequence
  Description of Artificial Sequence: Synthetic peptide
GASSRAT

SEQ ID NO: 1868 - protein, 9 aa, Artificial Sequence
  Description of Artificial Sequence: Synthetic peptide
QQSSRTPWT

SEQ ID NO: 1869 - protein, 5 aa, Artificial Sequence
  Description of Artificial Sequence: Synthetic peptide
HYLMT

SEQ ID NO: 1870 - protein, 17 aa, Artificial Sequence
  Description of Artificial Sequence: Synthetic peptide
YISPSGGHTIYADSVKG

SEQ ID NO: 1871 - protein, 16 aa, Artificial Sequence
  Description of Artificial Sequence: Synthetic peptide
VGRGIAARSRTSQLDY

SEQ ID NO: 1872 - protein, 12 aa, Artificial Sequence
  Description of Artificial Sequence: Synthetic peptide
RTSQFVNSNYLA

SEQ ID NO: 1873 - protein, 7 aa, Artificial Sequence
  Description of Artificial Sequence: Synthetic peptide
GASSRAT

SEQ ID NO: 1874 - protein, 9 aa, Artificial Sequence
  Description of Artificial Sequence: Synthetic peptide
QQSSRTPWT

SEQ ID NO: 1875 - protein, 5 aa, Artificial Sequence
  Description of Artificial Sequence: Synthetic peptide
HYLMT

SEQ ID NO: 1876 - protein, 17 aa, Artificial Sequence
  Description of Artificial Sequence: Synthetic peptide
YISPSGGHTIYADSVKG

SEQ ID NO: 1877 - protein, 16 aa, Artificial Sequence
  Description of Artificial Sequence: Synthetic peptide
VARGIAARSRTSYLDY

SEQ ID NO: 1878 - protein, 12 aa, Artificial Sequence
  Description of Artificial Sequence: Synthetic peptide
RTSQFVNSNYLA

SEQ ID NO: 1879 - protein, 7 aa, Artificial Sequence
  Description of Artificial Sequence: Synthetic peptide
GASSRAT

SEQ ID NO: 1880 - protein, 9 aa, Artificial Sequence
  Description of Artificial Sequence: Synthetic peptide
QQSSRTPWT

SEQ ID NO: 1881 - protein, 5 aa, Artificial Sequence
  Description of Artificial Sequence: Synthetic peptide
NYMMG

SEQ ID NO: 1882 - protein, 17 aa, Artificial Sequence
  Description of Artificial Sequence: Synthetic peptide
SISPSGGLTKYADSVKG

SEQ ID NO: 1883 - protein, 16 aa, Artificial Sequence
  Description of Artificial Sequence: Synthetic peptide
VARGIAARSRTSYFDY

SEQ ID NO: 1884 - protein, 12 aa, Artificial Sequence
  Description of Artificial Sequence: Synthetic peptide
RTSQFVNSNYLA

SEQ ID NO: 1885 - protein, 7 aa, Artificial Sequence
  Description of Artificial Sequence: Synthetic peptide
GASSRAT

SEQ ID NO: 1886 - protein, 9 aa, Artificial Sequence
  Description of Artificial Sequence: Synthetic peptide
QQSSRTPWT

SEQ ID NO: 1887 - protein, 5 aa, Artificial Sequence
  Description of Artificial Sequence: Synthetic peptide
HYLMT

SEQ ID NO: 1888 - protein, 17 aa, Artificial Sequence
  Description of Artificial Sequence: Synthetic peptide
YISPSGGHTIYADSVKG

SEQ ID NO: 1889 - protein, 16 aa, Artificial Sequence
  Description of Artificial Sequence: Synthetic peptide
VARGIAARSRTRYFDQ

SEQ ID NO: 1890 - protein, 12 aa, Artificial Sequence
  Description of Artificial Sequence: Synthetic peptide
RTSQFVNSNYLA

SEQ ID NO: 1891 - protein, 7 aa, Artificial Sequence
  Description of Artificial Sequence: Synthetic peptide
GASSRAT

SEQ ID NO: 1892 - protein, 9 aa, Artificial Sequence
  Description of Artificial Sequence: Synthetic peptide
QQSSRTPWT

SEQ ID NO: 1893 - protein, 5 aa, Artificial Sequence
  Description of Artificial Sequence: Synthetic peptide
GYMMV

SEQ ID NO: 1894 - protein, 17 aa, Artificial Sequence
  Description of Artificial Sequence: Synthetic peptide
RISPSGGPTIYADSVKG

SEQ ID NO: 1895 - protein, 16 aa, Artificial Sequence
  Description of Artificial Sequence: Synthetic peptide
VARGIAARSRTSYFDY

SEQ ID NO: 1896 - protein, 12 aa, Artificial Sequence
  Description of Artificial Sequence: Synthetic peptide
RTSQFVNSNYLA

SEQ ID NO: 1897 - protein, 7 aa, Artificial Sequence
  Description of Artificial Sequence: Synthetic peptide
GASSRAT

SEQ ID NO: 1898 - protein, 9 aa, Artificial Sequence
  Description of Artificial Sequence: Synthetic peptide
QQSSRTPWT

SEQ ID NO: 1899 - protein, 5 aa, Artificial Sequence
  Description of Artificial Sequence: Synthetic peptide
HYLMT

SEQ ID NO: 1900 - protein, 17 aa, Artificial Sequence
  Description of Artificial Sequence: Synthetic peptide
YISPSGGHTIYADSVKG

SEQ ID NO: 1901 - protein, 16 aa, Artificial Sequence
  Description of Artificial Sequence: Synthetic peptide
VARGIAARSRTSYFDQ

SEQ ID NO: 1902 - protein, 12 aa, Artificial Sequence
  Description of Artificial Sequence: Synthetic peptide
RTSQFVNSNYLA

SEQ ID NO: 1903 - protein, 7 aa, Artificial Sequence
  Description of Artificial Sequence: Synthetic peptide
GASSRAT

SEQ ID NO: 1904 - protein, 9 aa, Artificial Sequence
  Description of Artificial Sequence: Synthetic peptide
QQSSRTPWT

SEQ ID NO: 1905 - protein, 5 aa, Artificial Sequence
  Description of Artificial Sequence: Synthetic peptide
HYLMT

SEQ ID NO: 1906 - protein, 17 aa, Artificial Sequence
  Description of Artificial Sequence: Synthetic peptide
YISPSGGHTIYADSVKG

SEQ ID NO: 1907 - protein, 16 aa, Artificial Sequence
  Description of Artificial Sequence: Synthetic peptide
VARGIAARSRTILLDQ

SEQ ID NO: 1908 - protein, 12 aa, Artificial Sequence
  Description of Artificial Sequence: Synthetic peptide
RTSQFVNSNYLA

SEQ ID NO: 1909 - protein, 7 aa, Artificial Sequence
  Description of Artificial Sequence: Synthetic peptide
GASSRAT

SEQ ID NO: 1910 - protein, 9 aa, Artificial Sequence
  Description of Artificial Sequence: Synthetic peptide
QQSSRTPWT

SEQ ID NO: 1911 - protein, 5 aa, Artificial Sequence
  Description of Artificial Sequence: Synthetic peptide
HYLMT

SEQ ID NO: 1912 - protein, 17 aa, Artificial Sequence
  Description of Artificial Sequence: Synthetic peptide
YISPSGGHTIYADSVKG

SEQ ID NO: 1913 - protein, 16 aa, Artificial Sequence
  Description of Artificial Sequence: Synthetic peptide
VARGIAARSRTSFIDY

SEQ ID NO: 1914 - protein, 12 aa, Artificial Sequence
  Description of Artificial Sequence: Synthetic peptide
RTSQFVNSNYLA

SEQ ID NO: 1915 - protein, 7 aa, Artificial Sequence
  Description of Artificial Sequence: Synthetic peptide
GASSRAT

SEQ ID NO: 1916 - protein, 9 aa, Artificial Sequence
  Description of Artificial Sequence: Synthetic peptide
QQSSRTPWT

SEQ ID NO: 1917 - protein, 5 aa, Artificial Sequence
  Description of Artificial Sequence: Synthetic peptide
TYKMQ

SEQ ID NO: 1918 - protein, 17 aa, Artificial Sequence
  Description of Artificial Sequence: Synthetic peptide
SISPSGGPTNYADSVKG

SEQ ID NO: 1919 - protein, 16 aa, Artificial Sequence
  Description of Artificial Sequence: Synthetic peptide
VARGIAARSRTSYFDY

SEQ ID NO: 1920 - protein, 12 aa, Artificial Sequence
  Description of Artificial Sequence: Synthetic peptide
RTSQFVNSNYLA

SEQ ID NO: 1921 - protein, 7 aa, Artificial Sequence
  Description of Artificial Sequence: Synthetic peptide
GASSRAT

SEQ ID NO: 1922 - protein, 9 aa, Artificial Sequence
  Description of Artificial Sequence: Synthetic peptide
QQSSRTPWT

SEQ ID NO: 1923 - protein, 5 aa, Artificial Sequence
  Description of Artificial Sequence: Synthetic peptide
HYLMT

SEQ ID NO: 1924 - protein, 17 aa, Artificial Sequence
  Description of Artificial Sequence: Synthetic peptide
YISPSGGHTIYADSVKG

SEQ ID NO: 1925 - protein, 16 aa, Artificial Sequence
  Description of Artificial Sequence: Synthetic peptide
VARGIAARSRTSYLDF

SEQ ID NO: 1926 - protein, 12 aa, Artificial Sequence
  Description of Artificial Sequence: Synthetic peptide
RTSQFVNSNYLA

SEQ ID NO: 1927 - protein, 7 aa, Artificial Sequence
  Description of Artificial Sequence: Synthetic peptide
GASSRAT

SEQ ID NO: 1928 - protein, 9 aa, Artificial Sequence
  Description of Artificial Sequence: Synthetic peptide
QQSSRTPWT

SEQ ID NO: 1929 - protein, 5 aa, Artificial Sequence
  Description of Artificial Sequence: Synthetic peptide
HYLMT

SEQ ID NO: 1930 - protein, 17 aa, Artificial Sequence
  Description of Artificial Sequence: Synthetic peptide
YISPSGGHTIYADSVKG

SEQ ID NO: 1931 - protein, 16 aa, Artificial Sequence
  Description of Artificial Sequence: Synthetic peptide
VARGIAARSRTRSFDY

SEQ ID NO: 1932 - protein, 12 aa, Artificial Sequence
  Description of Artificial Sequence: Synthetic peptide
RTSQFVNSNYLA

SEQ ID NO: 1933 - protein, 7 aa, Artificial Sequence
  Description of Artificial Sequence: Synthetic peptide
GASSRAT

SEQ ID NO: 1934 - protein, 9 aa, Artificial Sequence
  Description of Artificial Sequence: Synthetic peptide
QQSSRTPWT

SEQ ID NO: 1935 - protein, 5 aa, Artificial Sequence
  Description of Artificial Sequence: Synthetic peptide
HYLMT

SEQ ID NO: 1936 - protein, 17 aa, Artificial Sequence
  Description of Artificial Sequence: Synthetic peptide
YISPSGGHTIYADSVKG

SEQ ID NO: 1937 - protein, 16 aa, Artificial Sequence
  Description of Artificial Sequence: Synthetic peptide
VARGIAARSRTSYFNQ

SEQ ID NO: 1938 - protein, 12 aa, Artificial Sequence
  Description of Artificial Sequence: Synthetic peptide
RTSQFVNSNYLA

SEQ ID NO: 1939 - protein, 7 aa, Artificial Sequence
  Description of Artificial Sequence: Synthetic peptide
GASSRAT

SEQ ID NO: 1940 - protein, 9 aa, Artificial Sequence
  Description of Artificial Sequence: Synthetic peptide
QQSSRTPWT

SEQ ID NO: 1941 - protein, 5 aa, Artificial Sequence
  Description of Artificial Sequence: Synthetic peptide
HYLMT

SEQ ID NO: 1942 - protein, 17 aa, Artificial Sequence
  Description of Artificial Sequence: Synthetic peptide
YISPSGGHTIYADSVKG

SEQ ID NO: 1943 - protein, 16 aa, Artificial Sequence
  Description of Artificial Sequence: Synthetic peptide
VARGIAARSRTSFFDQ

SEQ ID NO: 1944 - protein, 12 aa, Artificial Sequence
  Description of Artificial Sequence: Synthetic peptide
RTSQFVNSNYLA

SEQ ID NO: 1945 - protein, 7 aa, Artificial Sequence
  Description of Artificial Sequence: Synthetic peptide
GASSRAT

SEQ ID NO: 1946 - protein, 9 aa, Artificial Sequence
  Description of Artificial Sequence: Synthetic peptide
QQSSRTPWT

SEQ ID NO: 1947 - protein, 5 aa, Artificial Sequence
  Description of Artificial Sequence: Synthetic peptide
HYLMT

SEQ ID NO: 1948 - protein, 17 aa, Artificial Sequence
  Description of Artificial Sequence: Synthetic peptide
YISPSGGHTIYADSVKG

SEQ ID NO: 1949 - protein, 16 aa, Artificial Sequence
  Description of Artificial Sequence: Synthetic peptide
VARGIAARSRTSYFDT

SEQ ID NO: 1950 - protein, 12 aa, Artificial Sequence
  Description of Artificial Sequence: Synthetic peptide
RTSQFVNSNYLA

SEQ ID NO: 1951 - protein, 7 aa, Artificial Sequence
  Description of Artificial Sequence: Synthetic peptide
GASSRAT

SEQ ID NO: 1952 - protein, 9 aa, Artificial Sequence
  Description of Artificial Sequence: Synthetic peptide
QQSSRTPWT

SEQ ID NO: 1953 - protein, 5 aa, Artificial Sequence
  Description of Artificial Sequence: Synthetic peptide
DYMMT

SEQ ID NO: 1954 - protein, 17 aa, Artificial Sequence
  Description of Artificial Sequence: Synthetic peptide
YISPSGGLTSYADSVKG

SEQ ID NO: 1955 - protein, 16 aa, Artificial Sequence
  Description of Artificial Sequence: Synthetic peptide
VARGIAARSRTSYFDY

SEQ ID NO: 1956 - protein, 12 aa, Artificial Sequence
  Description of Artificial Sequence: Synthetic peptide
RTSQFVNSNYLA

SEQ ID NO: 1957 - protein, 7 aa, Artificial Sequence
  Description of Artificial Sequence: Synthetic peptide
GASSRAT

SEQ ID NO: 1958 - protein, 9 aa, Artificial Sequence
  Description of Artificial Sequence: Synthetic peptide
QQSSRTPWT

SEQ ID NO: 1959 - protein, 5 aa, Artificial Sequence
  Description of Artificial Sequence: Synthetic peptide
EYMMV

SEQ ID NO: 1960 - protein, 17 aa, Artificial Sequence
  Description of Artificial Sequence: Synthetic peptide
RISPSGGTTEYADSVKG

SEQ ID NO: 1961 - protein, 16 aa, Artificial Sequence
  Description of Artificial Sequence: Synthetic peptide
VARGIAARSRTSYFDY

SEQ ID NO: 1962 - protein, 12 aa, Artificial Sequence
  Description of Artificial Sequence: Synthetic peptide
RTSQFVNSNYLA

SEQ ID NO: 1963 - protein, 7 aa, Artificial Sequence
  Description of Artificial Sequence: Synthetic peptide
GASSRAT

SEQ ID NO: 1964 - protein, 9 aa, Artificial Sequence
  Description of Artificial Sequence: Synthetic peptide
QQSSRTPWT

SEQ ID NO: 1965 - protein, 5 aa, Artificial Sequence
  Description of Artificial Sequence: Synthetic peptide
HYLMT

SEQ ID NO: 1966 - protein, 17 aa, Artificial Sequence
  Description of Artificial Sequence: Synthetic peptide
YISPSGGHTIYADSVKG

SEQ ID NO: 1967 - protein, 16 aa, Artificial Sequence
  Description of Artificial Sequence: Synthetic peptide
VARGIAARSRTRYIDQ

SEQ ID NO: 1968 - protein, 12 aa, Artificial Sequence
  Description of Artificial Sequence: Synthetic peptide
RTSQFVNSNYLA

SEQ ID NO: 1969 - protein, 7 aa, Artificial Sequence
  Description of Artificial Sequence: Synthetic peptide
GASSRAT

SEQ ID NO: 1970 - protein, 9 aa, Artificial Sequence
  Description of Artificial Sequence: Synthetic peptide
QQSSRTPWT

SEQ ID NO: 1971 - protein, 5 aa, Artificial Sequence
  Description of Artificial Sequence: Synthetic peptide
VYMMS

SEQ ID NO: 1972 - protein, 17 aa, Artificial Sequence
  Description of Artificial Sequence: Synthetic peptide
SIVPSGGSTTYADSVKG

SEQ ID NO: 1973 - protein, 16 aa, Artificial Sequence
  Description of Artificial Sequence: Synthetic peptide
VARGIAARSRTSYFDY

SEQ ID NO: 1974 - protein, 12 aa, Artificial Sequence
  Description of Artificial Sequence: Synthetic peptide
RTSQFVNSNYLA

SEQ ID NO: 1975 - protein, 7 aa, Artificial Sequence
  Description of Artificial Sequence: Synthetic peptide
GASSRAT

SEQ ID NO: 1976 - protein, 9 aa, Artificial Sequence
  Description of Artificial Sequence: Synthetic peptide
QQSSRTPWT

SEQ ID NO: 1977 - protein, 5 aa, Artificial Sequence
  Description of Artificial Sequence: Synthetic peptide
HYLMT

SEQ ID NO: 1978 - protein, 17 aa, Artificial Sequence
  Description of Artificial Sequence: Synthetic peptide
YISPSGGHTIYADSVKG

SEQ ID NO: 1979 - protein, 16 aa, Artificial Sequence
  Description of Artificial Sequence: Synthetic peptide
VARGIAYRRRTSYFDY

SEQ ID NO: 1980 - protein, 12 aa, Artificial Sequence
  Description of Artificial Sequence: Synthetic peptide
RTSQFVNSNYLA

SEQ ID NO: 1981 - protein, 7 aa, Artificial Sequence
  Description of Artificial Sequence: Synthetic peptide
GASSRAT

SEQ ID NO: 1982 - protein, 9 aa, Artificial Sequence
  Description of Artificial Sequence: Synthetic peptide
QQSSRTPWT

SEQ ID NO: 1983 - protein, 5 aa, Artificial Sequence
  Description of Artificial Sequence: Synthetic peptide
HYLMT

SEQ ID NO: 1984 - protein, 17 aa, Artificial Sequence
  Description of Artificial Sequence: Synthetic peptide
YISPSGGHTIYADSVKG

SEQ ID NO: 1985 - protein, 16 aa, Artificial Sequence
  Description of Artificial Sequence: Synthetic peptide
VARGIADRSRTSYSDY

SEQ ID NO: 1986 - protein, 12 aa, Artificial Sequence
  Description of Artificial Sequence: Synthetic peptide
RTSQFVNSNYLA

SEQ ID NO: 1987 - protein, 7 aa, Artificial Sequence
  Description of Artificial Sequence: Synthetic peptide
GASSRAT

SEQ ID NO: 1988 - protein, 9 aa, Artificial Sequence
  Description of Artificial Sequence: Synthetic peptide
QQSSRTPWT

SEQ ID NO: 1989 - protein, 5 aa, Artificial Sequence
  Description of Artificial Sequence: Synthetic peptide
QYMMM

SEQ ID NO: 1990 - protein, 17 aa, Artificial Sequence
  Description of Artificial Sequence: Synthetic peptide
RISPSGGSTLYADSVKG

SEQ ID NO: 1991 - protein, 16 aa, Artificial Sequence
  Description of Artificial Sequence: Synthetic peptide
VARGIAARSRTSYFDY

SEQ ID NO: 1992 - protein, 12 aa, Artificial Sequence
  Description of Artificial Sequence: Synthetic peptide
RTSQFVNSNYLA

SEQ ID NO: 1993 - protein, 7 aa, Artificial Sequence
  Description of Artificial Sequence: Synthetic peptide
GASSRAT

SEQ ID NO: 1994 - protein, 9 aa, Artificial Sequence
  Description of Artificial Sequence: Synthetic peptide
QQSSRTPWT

SEQ ID NO: 1995 - protein, 5 aa, Artificial Sequence
  Description of Artificial Sequence: Synthetic peptide
DYMMM

SEQ ID NO: 1996 - protein, 17 aa, Artificial Sequence
  Description of Artificial Sequence: Synthetic peptide
SIVPSGGHTQYADSVKG

SEQ ID NO: 1997 - protein, 16 aa, Artificial Sequence
  Description of Artificial Sequence: Synthetic peptide
VARGIAARSRTSYFDY

SEQ ID NO: 1998 - protein, 12 aa, Artificial Sequence
  Description of Artificial Sequence: Synthetic peptide
RTSQFVNSNYLA

SEQ ID NO: 1999 - protein, 7 aa, Artificial Sequence
  Description of Artificial Sequence: Synthetic peptide
GASSRAT

SEQ ID NO: 2000 - protein, 9 aa, Artificial Sequence
  Description of Artificial Sequence: Synthetic peptide
QQSSRTPWT

SEQ ID NO: 2001 - protein, 5 aa, Artificial Sequence
  Description of Artificial Sequence: Synthetic peptide
HYLMT

SEQ ID NO: 2002 - protein, 17 aa, Artificial Sequence
  Description of Artificial Sequence: Synthetic peptide
YISPSGGHTIYADSVKG

SEQ ID NO: 2003 - protein, 16 aa, Artificial Sequence
  Description of Artificial Sequence: Synthetic peptide
VARGIAARSRNSQQDY

SEQ ID NO: 2004 - protein, 12 aa, Artificial Sequence
  Description of Artificial Sequence: Synthetic peptide
RTSQFVNSNYLA

SEQ ID NO: 2005 - protein, 7 aa, Artificial Sequence
  Description of Artificial Sequence: Synthetic peptide
GASSRAT

SEQ ID NO: 2006 - protein, 9 aa, Artificial Sequence
  Description of Artificial Sequence: Synthetic peptide
QQSSRTPWT

SEQ ID NO: 2007 - protein, 5 aa, Artificial Sequence
  Description of Artificial Sequence: Synthetic peptide
HYLMT

SEQ ID NO: 2008 - protein, 17 aa, Artificial Sequence
  Description of Artificial Sequence: Synthetic peptide
YISPSGGHTIYADSVKG

SEQ ID NO: 2009 - protein, 16 aa, Artificial Sequence
  Description of Artificial Sequence: Synthetic peptide
VARGIAARSRTSYFDQ

SEQ ID NO: 2010 - protein, 12 aa, Artificial Sequence
  Description of Artificial Sequence: Synthetic peptide
RTSQFVNSNYLA

SEQ ID NO: 2011 - protein, 7 aa, Artificial Sequence
  Description of Artificial Sequence: Synthetic peptide
GASSRAT

SEQ ID NO: 2012 - protein, 9 aa, Artificial Sequence
  Description of Artificial Sequence: Synthetic peptide
QQSSRTPWT

SEQ ID NO: 2013 - protein, 5 aa, Artificial Sequence
  Description of Artificial Sequence: Synthetic peptide
HYLMT

SEQ ID NO: 2014 - protein, 17 aa, Artificial Sequence
  Description of Artificial Sequence: Synthetic peptide
YISPSGGHTIYADSVKG

SEQ ID NO: 2015 - protein, 16 aa, Artificial Sequence
  Description of Artificial Sequence: Synthetic peptide
VARGIAARSRTVYFDH

SEQ ID NO: 2016 - protein, 12 aa, Artificial Sequence
  Description of Artificial Sequence: Synthetic peptide
RTSQFVNSNYLA

SEQ ID NO: 2017 - protein, 7 aa, Artificial Sequence
  Description of Artificial Sequence: Synthetic peptide
GASSRAT

SEQ ID NO: 2018 - protein, 9 aa, Artificial Sequence
  Description of Artificial Sequence: Synthetic peptide
QQSSRTPWT

SEQ ID NO: 2019 - protein, 5 aa, Artificial Sequence
  Description of Artificial Sequence: Synthetic peptide
TYMMQ

SEQ ID NO: 2020 - protein, 17 aa, Artificial Sequence
  Description of Artificial Sequence: Synthetic peptide
YIGPSGGKTDYADSVKG

SEQ ID NO: 2021 - protein, 16 aa, Artificial Sequence
  Description of Artificial Sequence: Synthetic peptide
VARGIAARSRTSYFDY

SEQ ID NO: 2022 - protein, 12 aa, Artificial Sequence
  Description of Artificial Sequence: Synthetic peptide
RTSQFVNSNYLA

SEQ ID NO: 2023 - protein, 7 aa, Artificial Sequence
  Description of Artificial Sequence: Synthetic peptide
GASSRAT

SEQ ID NO: 2024 - protein, 9 aa, Artificial Sequence
  Description of Artificial Sequence: Synthetic peptide
QQSSRTPWT

SEQ ID NO: 2025 - protein, 5 aa, Artificial Sequence
  Description of Artificial Sequence: Synthetic peptide
HYLMT

SEQ ID NO: 2026 - protein, 17 aa, Artificial Sequence
  Description of Artificial Sequence: Synthetic peptide
YISPSGGHTIYADSVKG

SEQ ID NO: 2027 - protein, 16 aa, Artificial Sequence
  Description of Artificial Sequence: Synthetic peptide
VAQGIAARSRTTQFDY

SEQ ID NO: 2028 - protein, 12 aa, Artificial Sequence
  Description of Artificial Sequence: Synthetic peptide
RTSQFVNSNYLA

SEQ ID NO: 2029 - protein, 7 aa, Artificial Sequence
  Description of Artificial Sequence: Synthetic peptide
GASSRAT

SEQ ID NO: 2030 - protein, 9 aa, Artificial Sequence
  Description of Artificial Sequence: Synthetic peptide
QQSSRTPWT

SEQ ID NO: 2031 - protein, 5 aa, Artificial Sequence
  Description of Artificial Sequence: Synthetic peptide
GYKMQ

SEQ ID NO: 2032 - protein, 17 aa, Artificial Sequence
  Description of Artificial Sequence: Synthetic peptide
SISPSGGITMYADSVKG

SEQ ID NO: 2033 - protein, 16 aa, Artificial Sequence
  Description of Artificial Sequence: Synthetic peptide
VARGIAARSRTSYFDY

SEQ ID NO: 2034 - protein, 12 aa, Artificial Sequence
  Description of Artificial Sequence: Synthetic peptide
RTSQFVNSNYLA

SEQ ID NO: 2035 - protein, 7 aa, Artificial Sequence
  Description of Artificial Sequence: Synthetic peptide
GASSRAT

SEQ ID NO: 2036 - protein, 9 aa, Artificial Sequence
  Description of Artificial Sequence: Synthetic peptide
QQSSRTPWT

SEQ ID NO: 2037 - protein, 5 aa, Artificial Sequence
  Description of Artificial Sequence: Synthetic peptide
HYLMT

SEQ ID NO: 2038 - protein, 17 aa, Artificial Sequence
  Description of Artificial Sequence: Synthetic peptide
YISPSGGHTIYADSVKG

SEQ ID NO: 2039 - protein, 16 aa, Artificial Sequence
  Description of Artificial Sequence: Synthetic peptide
VGRGIAARSRTSFFDQ

SEQ ID NO: 2040 - protein, 12 aa, Artificial Sequence
  Description of Artificial Sequence: Synthetic peptide
RTSQFVNSNYLA

SEQ ID NO: 2041 - protein, 7 aa, Artificial Sequence
  Description of Artificial Sequence: Synthetic peptide
GASSRAT

SEQ ID NO: 2042 - protein, 9 aa, Artificial Sequence
  Description of Artificial Sequence: Synthetic peptide
QQSSRTPWT

SEQ ID NO: 2043 - protein, 5 aa, Artificial Sequence
  Description of Artificial Sequence: Synthetic peptide
TYLMA

SEQ ID NO: 2044 - protein, 17 aa, Artificial Sequence
  Description of Artificial Sequence: Synthetic peptide
GIVSSGGRTLYADSVKG

SEQ ID NO: 2045 - protein, 16 aa, Artificial Sequence
  Description of Artificial Sequence: Synthetic peptide
VARGIAARSRTSYFDY

SEQ ID NO: 2046 - protein, 12 aa, Artificial Sequence
  Description of Artificial Sequence: Synthetic peptide
RTSQFVNSNYLA

SEQ ID NO: 2047 - protein, 7 aa, Artificial Sequence
  Description of Artificial Sequence: Synthetic peptide
GASSRAT

SEQ ID NO: 2048 - protein, 9 aa, Artificial Sequence
  Description of Artificial Sequence: Synthetic peptide
QQSSRTPWT

SEQ ID NO: 2049 - protein, 5 aa, Artificial Sequence
  Description of Artificial Sequence: Synthetic peptide
HYLMT

SEQ ID NO: 2050 - protein, 17 aa, Artificial Sequence
  Description of Artificial Sequence: Synthetic peptide
YISPSGGHTIYADSVKG

SEQ ID NO: 2051 - protein, 16 aa, Artificial Sequence
  Description of Artificial Sequence: Synthetic peptide
VARGIAARSRTSQFDH

SEQ ID NO: 2052 - protein, 12 aa, Artificial Sequence
  Description of Artificial Sequence: Synthetic peptide
RTSQFVNSNYLA

SEQ ID NO: 2053 - protein, 7 aa, Artificial Sequence
  Description of Artificial Sequence: Synthetic peptide
GASSRAT

SEQ ID NO: 2054 - protein, 9 aa, Artificial Sequence
  Description of Artificial Sequence: Synthetic peptide
QQSSRTPWT

SEQ ID NO: 2055 - protein, 5 aa, Artificial Sequence
  Description of Artificial Sequence: Synthetic peptide
NYTMG

SEQ ID NO: 2056 - protein, 17 aa, Artificial Sequence
  Description of Artificial Sequence: Synthetic peptide
SISPSGGKTDYADSVKG

SEQ ID NO: 2057 - protein, 16 aa, Artificial Sequence
  Description of Artificial Sequence: Synthetic peptide
VARGIAARSRTSYFDY

SEQ ID NO: 2058 - protein, 12 aa, Artificial Sequence
  Description of Artificial Sequence: Synthetic peptide
RTSQFVNSNYLA

SEQ ID NO: 2059 - protein, 7 aa, Artificial Sequence
  Description of Artificial Sequence: Synthetic peptide
GASSRAT

SEQ ID NO: 2060 - protein, 9 aa, Artificial Sequence
  Description of Artificial Sequence: Synthetic peptide
QQSSRTPWT

SEQ ID NO: 2061 - protein, 5 aa, Artificial Sequence
  Description of Artificial Sequence: Synthetic peptide
EYMMM

SEQ ID NO: 2062 - protein, 17 aa, Artificial Sequence
  Description of Artificial Sequence: Synthetic peptide
VISPSGGQTHYADSVKG

SEQ ID NO: 2063 - protein, 16 aa, Artificial Sequence
  Description of Artificial Sequence: Synthetic peptide
VARGIAARSRTSYFDY

SEQ ID NO: 2064 - protein, 12 aa, Artificial Sequence
  Description of Artificial Sequence: Synthetic peptide
RTSQFVNSNYLA

SEQ ID NO: 2065 - protein, 7 aa, Artificial Sequence
  Description of Artificial Sequence: Synthetic peptide
GASSRAT

SEQ ID NO: 2066 - protein, 9 aa, Artificial Sequence
  Description of Artificial Sequence: Synthetic peptide
QQSSRTPWT

SEQ ID NO: 2067 - protein, 5 aa, Artificial Sequence
  Description of Artificial Sequence: Synthetic peptide
NYTMQ

SEQ ID NO: 2068 - protein, 17 aa, Artificial Sequence
  Description of Artificial Sequence: Synthetic peptide
YISPSGGYTGYADSVKG

SEQ ID NO: 2069 - protein, 16 aa, Artificial Sequence
  Description of Artificial Sequence: Synthetic peptide
VARGIAARSRTSYFDY

SEQ ID NO: 2070 - protein, 12 aa, Artificial Sequence
  Description of Artificial Sequence: Synthetic peptide
RTSQFVNSNYLA

SEQ ID NO: 2071 - protein, 7 aa, Artificial Sequence
  Description of Artificial Sequence: Synthetic peptide
GASSRAT

SEQ ID NO: 2072 - protein, 9 aa, Artificial Sequence
  Description of Artificial Sequence: Synthetic peptide
QQSSRTPWT

SEQ ID NO: 2073 - protein, 5 aa, Artificial Sequence
  Description of Artificial Sequence: Synthetic peptide
HYLMT

SEQ ID NO: 2074 - protein, 17 aa, Artificial Sequence
  Description of Artificial Sequence: Synthetic peptide
YISPSGGHTIYADSVKG

SEQ ID NO: 2075 - protein, 16 aa, Artificial Sequence
  Description of Artificial Sequence: Synthetic peptide
VARGIAARSRTINLDY

SEQ ID NO: 2076 - protein, 12 aa, Artificial Sequence
  Description of Artificial Sequence: Synthetic peptide
RTSQFVNSNYLA

SEQ ID NO: 2077 - protein, 7 aa, Artificial Sequence
  Description of Artificial Sequence: Synthetic peptide
GASSRAT

SEQ ID NO: 2078 - protein, 9 aa, Artificial Sequence
  Description of Artificial Sequence: Synthetic peptide
QQSSRTPWT

SEQ ID NO: 2079 - protein, 5 aa, Artificial Sequence
  Description of Artificial Sequence: Synthetic peptide
HYLMT

SEQ ID NO: 2080 - protein, 17 aa, Artificial Sequence
  Description of Artificial Sequence: Synthetic peptide
YISPSGGHTIYADSVKG

SEQ ID NO: 2081 - protein, 16 aa, Artificial Sequence
  Description of Artificial Sequence: Synthetic peptide
VARGIAARQRTSYYDY

SEQ ID NO: 2082 - protein, 12 aa, Artificial Sequence
  Description of Artificial Sequence: Synthetic peptide
RTSQFVNSNYLA

SEQ ID NO: 2083 - protein, 7 aa, Artificial Sequence
  Description of Artificial Sequence: Synthetic peptide
GASSRAT

SEQ ID NO: 2084 - protein, 9 aa, Artificial Sequence
  Description of Artificial Sequence: Synthetic peptide
QQSSRTPWT

SEQ ID NO: 2085 - protein, 5 aa, Artificial Sequence
  Description of Artificial Sequence: Synthetic peptide
HYLMT

SEQ ID NO: 2086 - protein, 17 aa, Artificial Sequence
  Description of Artificial Sequence: Synthetic peptide
YISPSGGHTIYADSVKG

SEQ ID NO: 2087 - protein, 16 aa, Artificial Sequence
  Description of Artificial Sequence: Synthetic peptide
VAQGISGRSRLSYVDY

SEQ ID NO: 2088 - protein, 12 aa, Artificial Sequence
  Description of Artificial Sequence: Synthetic peptide
RTSQFVNSNYLA

SEQ ID NO: 2089 - protein, 7 aa, Artificial Sequence
  Description of Artificial Sequence: Synthetic peptide
GASSRAT

SEQ ID NO: 2090 - protein, 9 aa, Artificial Sequence
  Description of Artificial Sequence: Synthetic peptide
QQSSRTPWT

SEQ ID NO: 2091 - protein, 5 aa, Artificial Sequence
  Description of Artificial Sequence: Synthetic peptide
HYLMT

SEQ ID NO: 2092 - protein, 17 aa, Artificial Sequence
  Description of Artificial Sequence: Synthetic peptide
YISPSGGHTIYADSVKG

SEQ ID NO: 2093 - protein, 16 aa, Artificial Sequence
  Description of Artificial Sequence: Synthetic peptide
VARGIAARSRTSQFDY

SEQ ID NO: 2094 - protein, 12 aa, Artificial Sequence
  Description of Artificial Sequence: Synthetic peptide
RTSQFVNSNYLA

SEQ ID NO: 2095 - protein, 7 aa, Artificial Sequence
  Description of Artificial Sequence: Synthetic peptide
GASSRAT

SEQ ID NO: 2096 - protein, 9 aa, Artificial Sequence
  Description of Artificial Sequence: Synthetic peptide
QQSSRTPWT

SEQ ID NO: 2097 - protein, 5 aa, Artificial Sequence
  Description of Artificial Sequence: Synthetic peptide
HYLMT

SEQ ID NO: 2098 - protein, 17 aa, Artificial Sequence
  Description of Artificial Sequence: Synthetic peptide
YISPSGGHTIYADSVKG

SEQ ID NO: 2099 - protein, 16 aa, Artificial Sequence
  Description of Artificial Sequence: Synthetic peptide
VARGITARSRTSYFDD

SEQ ID NO: 2100 - protein, 12 aa, Artificial Sequence
  Description of Artificial Sequence: Synthetic peptide
RTSQFVNSNYLA

SEQ ID NO: 2101 - protein, 7 aa, Artificial Sequence
  Description of Artificial Sequence: Synthetic peptide
GASSRAT

SEQ ID NO: 2102 - protein, 9 aa, Artificial Sequence
  Description of Artificial Sequence: Synthetic peptide
QQSSRTPWT

SEQ ID NO: 2103 - protein, 5 aa, Artificial Sequence
  Description of Artificial Sequence: Synthetic peptide
NYDMI

SEQ ID NO: 2104 - protein, 17 aa, Artificial Sequence
  Description of Artificial Sequence: Synthetic peptide
SISSSGGTTKYADSVKG

SEQ ID NO: 2105 - protein, 16 aa, Artificial Sequence
  Description of Artificial Sequence: Synthetic peptide
VARGIAARSRTSYFDY

SEQ ID NO: 2106 - protein, 12 aa, Artificial Sequence
  Description of Artificial Sequence: Synthetic peptide
RTSQFVNSNYLA

SEQ ID NO: 2107 - protein, 7 aa, Artificial Sequence
  Description of Artificial Sequence: Synthetic peptide
GASSRAT

SEQ ID NO: 2108 - protein, 9 aa, Artificial Sequence
  Description of Artificial Sequence: Synthetic peptide
QQSSRTPWT

SEQ ID NO: 2109 - protein, 5 aa, Artificial Sequence
  Description of Artificial Sequence: Synthetic peptide
VYMMI

SEQ ID NO: 2110 - protein, 17 aa, Artificial Sequence
  Description of Artificial Sequence: Synthetic peptide
SISPSGGQTTYADSVKG

SEQ ID NO: 2111 - protein, 16 aa, Artificial Sequence
  Description of Artificial Sequence: Synthetic peptide
VARGIAARSRTSYFDY

SEQ ID NO: 2112 - protein, 12 aa, Artificial Sequence
  Description of Artificial Sequence: Synthetic peptide
RTSQFVNSNYLA

SEQ ID NO: 2113 - protein, 7 aa, Artificial Sequence
  Description of Artificial Sequence: Synthetic peptide
GASSRAT

SEQ ID NO: 2114 - protein, 9 aa, Artificial Sequence
  Description of Artificial Sequence: Synthetic peptide
QQSSRTPWT

SEQ ID NO: 2115 - protein, 5 aa, Artificial Sequence
  Description of Artificial Sequence: Synthetic peptide
HYLMT

SEQ ID NO: 2116 - protein, 17 aa, Artificial Sequence
  Description of Artificial Sequence: Synthetic peptide
YISPSGGHTIYADSVKG

SEQ ID NO: 2117 - protein, 16 aa, Artificial Sequence
  Description of Artificial Sequence: Synthetic peptide
QARGIAARSRTSYFDY

SEQ ID NO: 2118 - protein, 12 aa, Artificial Sequence
  Description of Artificial Sequence: Synthetic peptide
RTSQFVNSNYLA

SEQ ID NO: 2119 - protein, 7 aa, Artificial Sequence
  Description of Artificial Sequence: Synthetic peptide
GASSRAT

SEQ ID NO: 2120 - protein, 9 aa, Artificial Sequence
  Description of Artificial Sequence: Synthetic peptide
QQSSRTPWT

SEQ ID NO: 2121 - protein, 5 aa, Artificial Sequence
  Description of Artificial Sequence: Synthetic peptide
HYLMT

SEQ ID NO: 2122 - protein, 17 aa, Artificial Sequence
  Description of Artificial Sequence: Synthetic peptide
YISPSGGHTIYADSVKG

SEQ ID NO: 2123 - protein, 16 aa, Artificial Sequence
  Description of Artificial Sequence: Synthetic peptide
VARGISARSRTSCFDY

SEQ ID NO: 2124 - protein, 12 aa, Artificial Sequence
  Description of Artificial Sequence: Synthetic peptide
RTSQFVNSNYLA

SEQ ID NO: 2125 - protein, 7 aa, Artificial Sequence
  Description of Artificial Sequence: Synthetic peptide
GASSRAT

SEQ ID NO: 2126 - protein, 9 aa, Artificial Sequence
  Description of Artificial Sequence: Synthetic peptide
QQSSRTPWT

SEQ ID NO: 2127 - protein, 5 aa, Artificial Sequence
  Description of Artificial Sequence: Synthetic peptide
QYMMV

SEQ ID NO: 2128 - protein, 17 aa, Artificial Sequence
  Description of Artificial Sequence: Synthetic peptide
SIYSSGGNTPYADSVKG

SEQ ID NO: 2129 - protein, 16 aa, Artificial Sequence
  Description of Artificial Sequence: Synthetic peptide
VARGIAARSRTSYFDY

SEQ ID NO: 2130 - protein, 12 aa, Artificial Sequence
  Description of Artificial Sequence: Synthetic peptide
RTSQFVNSNYLA

SEQ ID NO: 2131 - protein, 7 aa, Artificial Sequence
  Description of Artificial Sequence: Synthetic peptide
GASSRAT

SEQ ID NO: 2132 - protein, 9 aa, Artificial Sequence
  Description of Artificial Sequence: Synthetic peptide
QQSSRTPWT

SEQ ID NO: 2133 - protein, 5 aa, Artificial Sequence
  Description of Artificial Sequence: Synthetic peptide
HYLMT

SEQ ID NO: 2134 - protein, 17 aa, Artificial Sequence
  Description of Artificial Sequence: Synthetic peptide
YISPSGGHTIYADSVKG

SEQ ID NO: 2135 - protein, 16 aa, Artificial Sequence
  Description of Artificial Sequence: Synthetic peptide
VGRGIAARSRTSYFDK

SEQ ID NO: 2136 - protein, 12 aa, Artificial Sequence
  Description of Artificial Sequence: Synthetic peptide
RTSQFVNSNYLA

SEQ ID NO: 2137 - protein, 7 aa, Artificial Sequence
  Description of Artificial Sequence: Synthetic peptide
GASSRAT

SEQ ID NO: 2138 - protein, 9 aa, Artificial Sequence
  Description of Artificial Sequence: Synthetic peptide
QQSSRTPWT

SEQ ID NO: 2139 - protein, 5 aa, Artificial Sequence
  Description of Artificial Sequence: Synthetic peptide
QYDMI

SEQ ID NO: 2140 - protein, 17 aa, Artificial Sequence
  Description of Artificial Sequence: Synthetic peptide
YISSSGGFTRYADSVKG

SEQ ID NO: 2141 - protein, 16 aa, Artificial Sequence
  Description of Artificial Sequence: Synthetic peptide
VARGIAARSRTSYFDY

SEQ ID NO: 2142 - protein, 12 aa, Artificial Sequence
  Description of Artificial Sequence: Synthetic peptide
RTSQFVNSNYLA

SEQ ID NO: 2143 - protein, 7 aa, Artificial Sequence
  Description of Artificial Sequence: Synthetic peptide
GASSRAT

SEQ ID NO: 2144 - protein, 9 aa, Artificial Sequence
  Description of Artificial Sequence: Synthetic peptide
QQSSRTPWT

SEQ ID NO: 2145 - protein, 5 aa, Artificial Sequence
  Description of Artificial Sequence: Synthetic peptide
SQQMV

SEQ ID NO: 2146 - protein, 17 aa, Artificial Sequence
  Description of Artificial Sequence: Synthetic peptide
YISPSGGNTYYADSVKG

SEQ ID NO: 2147 - protein, 16 aa, Artificial Sequence
  Description of Artificial Sequence: Synthetic peptide
VARGIAARSRTSYFDY

SEQ ID NO: 2148 - protein, 12 aa, Artificial Sequence
  Description of Artificial Sequence: Synthetic peptide
RTSQFVNSNYLA

SEQ ID NO: 2149 - protein, 7 aa, Artificial Sequence
  Description of Artificial Sequence: Synthetic peptide
GASSRAT

SEQ ID NO: 2150 - protein, 9 aa, Artificial Sequence
  Description of Artificial Sequence: Synthetic peptide
QQSSRTPWT

SEQ ID NO: 2151 - protein, 5 aa, Artificial Sequence
  Description of Artificial Sequence: Synthetic peptide
NYLMA

SEQ ID NO: 2152 - protein, 17 aa, Artificial Sequence
  Description of Artificial Sequence: Synthetic peptide
WIVPSGGYTEYADSVKG

SEQ ID NO: 2153 - protein, 16 aa, Artificial Sequence
  Description of Artificial Sequence: Synthetic peptide
VARGIAARSRTSYFDY

SEQ ID NO: 2154 - protein, 12 aa, Artificial Sequence
  Description of Artificial Sequence: Synthetic peptide
RTSQFVNSNYLA

SEQ ID NO: 2155 - protein, 7 aa, Artificial Sequence
  Description of Artificial Sequence: Synthetic peptide
GASSRAT

SEQ ID NO: 2156 - protein, 9 aa, Artificial Sequence
  Description of Artificial Sequence: Synthetic peptide
QQSSRTPWT

SEQ ID NO: 2157 - protein, 5 aa, Artificial Sequence
  Description of Artificial Sequence: Synthetic peptide
HYLMT

SEQ ID NO: 2158 - protein, 17 aa, Artificial Sequence
  Description of Artificial Sequence: Synthetic peptide
YISPSGGHTIYADSVKG

SEQ ID NO: 2159 - protein, 16 aa, Artificial Sequence
  Description of Artificial Sequence: Synthetic peptide
VARGIVARSRTSNFDQ

SEQ ID NO: 2160 - protein, 12 aa, Artificial Sequence
  Description of Artificial Sequence: Synthetic peptide
RTSQFVNSNYLA

SEQ ID NO: 2161 - protein, 7 aa, Artificial Sequence
  Description of Artificial Sequence: Synthetic peptide
GASSRAT

SEQ ID NO: 2162 - protein, 9 aa, Artificial Sequence
  Description of Artificial Sequence: Synthetic peptide
QQSSRTPWT

SEQ ID NO: 2163 - protein, 5 aa, Artificial Sequence
  Description of Artificial Sequence: Synthetic peptide
HYLMT

SEQ ID NO: 2164 - protein, 17 aa, Artificial Sequence
  Description of Artificial Sequence: Synthetic peptide
YISPSGGHTIYADSVKG

SEQ ID NO: 2165 - protein, 16 aa, Artificial Sequence
  Description of Artificial Sequence: Synthetic peptide
LARGIAARSRTSYQDI

SEQ ID NO: 2166 - protein, 12 aa, Artificial Sequence
  Description of Artificial Sequence: Synthetic peptide
RTSQFVNSNYLA

SEQ ID NO: 2167 - protein, 7 aa, Artificial Sequence
  Description of Artificial Sequence: Synthetic peptide
GASSRAT

SEQ ID NO: 2168 - protein, 9 aa, Artificial Sequence
  Description of Artificial Sequence: Synthetic peptide
QQSSRTPWT

SEQ ID NO: 2169 - protein, 5 aa, Artificial Sequence
  Description of Artificial Sequence: Synthetic peptide
SYMMV

SEQ ID NO: 2170 - protein, 17 aa, Artificial Sequence
  Description of Artificial Sequence: Synthetic peptide
SISPSGGYTIQADSVKG

SEQ ID NO: 2171 - protein, 16 aa, Artificial Sequence
  Description of Artificial Sequence: Synthetic peptide
VARGIAARSRTSYFDY

SEQ ID NO: 2172 - protein, 109 aa, Artificial Sequence; identical to SEQ ID NO: 1138
  Description of Artificial Sequence: Synthetic polypeptide

SEQ ID NO: 2173 - protein, 142 aa, Artificial Sequence
  Description of Artificial Sequence: Synthetic polypeptide
EVQLLESGGGLVQPGGSLRLSCAASGFTFSNYLMAWVRQAPGKGLEWVSWIVPSGGYTEYADSVKGRFTISRDNSKNTLYLQMNSLRAEDTAVYYCARVARGIAARSRTSYFDYWGQGTLVTVSSASTKGPSVFPLAPSSKS

SEQ ID NO: 2174 - protein, 109 aa, Artificial Sequence; identical to SEQ ID NO: 1138
  Description of Artificial Sequence: Synthetic polypeptide

SEQ ID NO: 2175 - protein, 142 aa, Artificial Sequence
  Description of Artificial Sequence: Synthetic polypeptide
EVQLLESGGGLVQPGGSLRLSCAASGFTFSVYMMIWVRQAPGKGLEWVSSISPSGGQTTYADSVKGRFTISRDNSKNTLYLQMNSLRAEDTAVYYCARVARGIAARSRTSYFDYWGQGTLVTVSSASTKGPSVFPLAPSSKS

SEQ ID NO: 2176 - protein, 109 aa, Artificial Sequence; identical to SEQ ID NO: 1138
  Description of Artificial Sequence: Synthetic polypeptide

SEQ ID NO: 2177 - protein, 142 aa, Artificial Sequence
  Description of Artificial Sequence: Synthetic polypeptide
EVQLLESGGGLVQPGGSLRLSCAASGFTFSDYMMTWVRQAPGKGLQWVSYISPSGGLTSYADSVKGRFTISRDNSKNTLYLQMNSLRAEDTAVYYCARVARGIAARSRTSYFDYWGQGTLVTVSSASTKGPSVFPLAPSSKS

SEQ ID NO: 2178 - protein, 109 aa, Artificial Sequence; identical to SEQ ID NO: 1138
  Description of Artificial Sequence: Synthetic polypeptide

SEQ ID NO: 2179 - protein, 142 aa, Artificial Sequence
  Description of Artificial Sequence: Synthetic polypeptide
EVQLLESGGGLVQPGGSLRLSCAASGFTFSTYMMQWVRQAPGKGLEWVSYIGPSGGKTDYADSVKGRFTISRDNSKNTLYLQMNSLRAEDTAVYYCARVARGIAARSRTSYFDYWGQGTLVTVSSASTKGPSVFPLAPSSKS

SEQ ID NO: 2180 - protein, 109 aa, Artificial Sequence; identical to SEQ ID NO: 1138
  Description of Artificial Sequence: Synthetic polypeptide

SEQ ID NO: 2181 - protein, 142 aa, Artificial Sequence
  Description of Artificial Sequence: Synthetic polypeptide
EVQLLESGGGLVQPGGSLRLSCAASGFTFSTYLMAWVRQAPGKGLEWVSGIVSSGGRTLYADSVKGRFTISRDNSKNTLYLQMNSLRAEDTAVYYCARVARGIAARSRTSYFDYWGQGTLVTVSSASTKGPSVFPLAPSSKS

SEQ ID NO: 2182 - protein, 109 aa, Artificial Sequence; identical to SEQ ID NO: 1138
  Description of Artificial Sequence: Synthetic polypeptide

SEQ ID NO: 2183 - protein, 142 aa, Artificial Sequence
  Description of Artificial Sequence: Synthetic polypeptide
EVQLLESGGGLVQPGGSLRLSCAASGFTFSQYDMIWVRQAPGKGLEWVSYISSSGGFTRYADSVKGRFTISRDNSKNTLYLQMNSLRAEDTAVYYCARVARGIAARSRTSYFDYWGQGTLVTVSSASTKGPSVFPLAPSSKS

SEQ ID NO: 2184 - protein, 109 aa, Artificial Sequence; identical to SEQ ID NO: 1138
  Description of Artificial Sequence: Synthetic polypeptide

SEQ ID NO: 2185 - protein, 142 aa, Artificial Sequence
  Description of Artificial Sequence: Synthetic polypeptide
EVQLLESGGGLVQPGGSLRLSCAASGFTFSNYDMIWVRQAPGKGLEWVSSISSSGGTTKYADSVKGRFTISRDNSKNTLYLQMNSLRAEDTAVYYCARVARGIAARSRTSYFDYWGQGTLVTVSSASTKGPSVFPLAPSSKS

SEQ ID NO: 2186 - protein, 109 aa, Artificial Sequence; identical to SEQ ID NO: 1138
  Description of Artificial Sequence: Synthetic polypeptide

SEQ ID NO: 2187 - protein, 142 aa, Artificial Sequence
  Description of Artificial Sequence: Synthetic polypeptide
EVQLLESGGGLVQPGGSLRLSCAASGFTFSQYMMMWVRQAPGKGLEWVSRISPSGGSTLYADSVKGRFTISRDNSKNTLYLQMNSLRAEDTAVYYCARVARGIAARSRTSYFDYWGQGTLVTVSSASTKGPSVFPLAPSSKS

SEQ ID NO: 2188 - protein, 109 aa, Artificial Sequence; identical to SEQ ID NO: 1138
  Description of Artificial Sequence: Synthetic polypeptide

SEQ ID NO: 2189 - protein, 142 aa, Artificial Sequence
  Description of Artificial Sequence: Synthetic polypeptide
EVQLLESGGGLVQPGGSLRLSCAASGFTFSTYKMQWVRQAPGKGLEWVSSISPSGGPTNYADSVKGRFTISRDNSKNTLYLQMNSLRAEDTAVYYCARVARGIAARSRTSYFDYWGQGTLVTVSSASTKGPSVFPLAPSSKS

SEQ ID NO: 2190 - protein, 109 aa, Artificial Sequence; identical to SEQ ID NO: 1138
  Description of Artificial Sequence: Synthetic polypeptide

SEQ ID NO: 2191 - protein, 142 aa, Artificial Sequence
  Description of Artificial Sequence: Synthetic polypeptide
EVQLLESGGGLVQPGGSLRLSCAASGFTFSNYTMGWVRQAPGKGLEWVSSISPSGGKTDYADSVKGRFTISRDNSKNTLYLQMNSLRAEDTAVYYCARVARGIAARSRTSYFDYWGQGTLVTVSSASTKGPSVFPLAPSSKS

SEQ ID NO: 2192 - protein, 109 aa, Artificial Sequence; identical to SEQ ID NO: 1138
  Description of Artificial Sequence: Synthetic polypeptide

SEQ ID NO: 2193 - protein, 142 aa, Artificial Sequence
  Description of Artificial Sequence: Synthetic polypeptide
EVQLLESGGGLVQPGGSLRLSCAASGFTFSSQQMVWVRQAPGKGLEWVSYISPSGGNTYYADSVKGRFTISRDNSKNTLYLQMNSLRAEDTAVYYCARVARGIAARSRTSYFDYWGQGTLVTVSSASTKGPSVFPLAPSSKS

SEQ ID NO: 2194 - protein, 109 aa, Artificial Sequence; identical to SEQ ID NO: 1138
  Description of Artificial Sequence: Synthetic polypeptide

SEQ ID NO: 2195 - protein, 142 aa, Artificial Sequence
  Description of Artificial Sequence: Synthetic polypeptide
EVQLLESGGGLVQPGGSLRLSCAASGFTFSNYTMQWVRQAPGKGLQWVSYISPSGGYTGYADSVKGRFTISRDNSKNTLYLQMNSLRAEDTAVYYCARVARGIAARSRTSYFDYWGQGTLVTVSSASTKGPSVFPLAPSSKS

SEQ ID NO: 2196 - protein, 109 aa, Artificial Sequence; identical to SEQ ID NO: 1138
  Description of Artificial Sequence: Synthetic polypeptide

SEQ ID NO: 2197 - protein, 142 aa, Artificial Sequence
  Description of Artificial Sequence: Synthetic polypeptide
EVQLLESGGGLVQPGGSLRLSCAASGFTFSDYMMMWVRQAPGKGLEWVSSIVPSGGHTQYADSVKGRFTISRDNSKNTLYLQMNSLRAEDTAVYYCARVARGIAARSRTSYFDYWGQGTLVTVSSASTKGPSVFPLAPSSKS

SEQ ID NO: 2198 - protein, 109 aa, Artificial Sequence; identical to SEQ ID NO: 1138
  Description of Artificial Sequence: Synthetic polypeptide

SEQ ID NO: 2199 - protein, 142 aa, Artificial Sequence
  Description of Artificial Sequence: Synthetic polypeptide
EVQLLESGGGLVQPGGSLRLSCAASGFTFSNYMMGWVRQAPGKGLQWVSSISPSGGLTKYADSVKGRFTISRDNSKNTLYLQMNSLRAEDTAVYYCARVARGIAARSRTSYFDYWGQGTLVTVSSASTKGPSVFPLAPSSKS

SEQ ID NO: 2200 - protein, 109 aa, Artificial Sequence; identical to SEQ ID NO: 1138
  Description of Artificial Sequence: Synthetic polypeptide

SEQ ID NO: 2201 - protein, 142 aa, Artificial Sequence
  Description of Artificial Sequence: Synthetic polypeptide
EVQLLESGGGLVQPGGSLRLSCAASGFTFSQYLMAWVRQAPGKGLEWVSSIYPSGGWTKYADSVKGRFTISRDNSKNTLYLQMNSLRAEDTAVYYCARVARGIAARSRTSYFDYWGQGTLVTVSSASTKGPSVFPLAPSSKS

SEQ ID NO: 2202 - protein, 109 aa, Artificial Sequence; identical to SEQ ID NO: 1138
  Description of Artificial Sequence: Synthetic polypeptide

SEQ ID NO: 2203 - protein, 142 aa, Artificial Sequence
  Description of Artificial Sequence: Synthetic polypeptide
EVQLLESGGGLVQPGGSLRLSCAASGFTFSQYMMVWVRQAPGKGLEWVSSIYSSGGNTPYADSVKGRFTISRDNSKNTLYLQMNSLRAEDTAVYYCARVARGIAARSRTSYFDYWGQGTLVTVSSASTKGPSVFPLAPSSKS

SEQ ID NO: 2204 - protein, 109 aa, Artificial Sequence; identical to SEQ ID NO: 1138
  Description of Artificial Sequence: Synthetic polypeptide

SEQ ID NO: 2205 - protein, 142 aa, Artificial Sequence
  Description of Artificial Sequence: Synthetic polypeptide
EVQLLESGGGLVQPGGSLRLSCAASGFTFSEYMMMWVRQAPGKGLEWVSVISPSGGQTHYADSVKGRFTISRDNSKNTLYLQMNSLRAEDTAVYYCARVARGIAARSRTSYFDYWGQGTLVTVSSASTKGPSVFPLAPSSKS

SEQ ID NO: 2206 - protein, 109 aa, Artificial Sequence; identical to SEQ ID NO: 1138
  Description of Artificial Sequence: Synthetic polypeptide

SEQ ID NO: 2207 - protein, 142 aa, Artificial Sequence
  Description of Artificial Sequence: Synthetic polypeptide
EVQLLESGGGLVQPGGSLRLSCAASGFTFSGYMMVWVRQAPGKGLEWVSRISPSGGPTIYADSVKGRFTISRDNSKNTLYLQMNSLRAEDTAVYYCARVARGIAARSRTSYFDYWGQGTLVTVSSASTKGPSVFPLAPSSKS

SEQ ID NO: 2208 - protein, 109 aa, Artificial Sequence; identical to SEQ ID NO: 1138
  Description of Artificial Sequence: Synthetic polypeptide

SEQ ID NO: 2209 - protein, 142 aa, Artificial Sequence
  Description of Artificial Sequence: Synthetic polypeptide
EVQLLESGGGLVQPGGSLRLSCAASGFTFSVYMMSWVRQAPGKGLEWVSSIVPSGGSTTYADSVKGRFTISRDNSKNTLYLQMNSLRAEDTAVYYCARVARGIAARSRTSYFDYWGQGTLVTVSSASTKGPSVFPLAPSSKS

SEQ ID NO: 2210 - protein, 109 aa, Artificial Sequence; identical to SEQ ID NO: 1138
  Description of Artificial Sequence: Synthetic polypeptide

SEQ ID NO: 2211 - protein, 142 aa, Artificial Sequence
  Description of Artificial Sequence: Synthetic polypeptide
EVQLLESGGGLVQPGGSLRLSCAASGFTFSEYMMVWVRQAPGKGLEWVSRISPSGGTTEYADSVKGRFTISRDNSKNTLYLQMNSLRAEDTAVYYCARVARGIAARSRTSYFDYWGQGTLVTVSSASTKGPSVFPLAPSSKS

SEQ ID NO: 2212 - protein, 109 aa, Artificial Sequence; identical to SEQ ID NO: 1138
  Description of Artificial Sequence: Synthetic polypeptide

SEQ ID NO: 2213 - protein, 142 aa, Artificial Sequence
  Description of Artificial Sequence: Synthetic polypeptide
EVQLLESGGGLVQPGGSLRLSCAASGFTFSSYMMVWVRQAPGKGLEWVSSISPSGGYTIQADSVKGRFTISRDNSKNTLYLQMNSLRAEDTAVYYCARVARGIAARSRTSYFDYWGQGTLVTVSSASTKGPSVFPLAPSSKS

SEQ ID NO: 2214 - protein, 109 aa, Artificial Sequence; identical to SEQ ID NO: 1138
  Description of Artificial Sequence: Synthetic polypeptide

SEQ ID NO: 2215 - protein, 142 aa, Artificial Sequence
  Description of Artificial Sequence: Synthetic polypeptide
EVQLLESGGGLVQPGGSLRLSCAASGFTFSGYKMQWVRQAPGKGLEWVSSISPSGGITMYADSVKGRFTISRDNSKNTLYLQMNSLRAEDTAVYYCARVARGIAARSRTSYFDYWGQGTLVTVSSASTKGPSVFPLAPSSKS

SEQ ID NO: 2216 - protein, 109 aa, Artificial Sequence; identical to SEQ ID NO: 1138
  Description of Artificial Sequence: Synthetic polypeptide

SEQ ID NO: 2217 - protein, 142 aa, Artificial Sequence
  Description of Artificial Sequence: Synthetic polypeptide
EVQLLESGGGLVQPGGSLRLSCAASGFTFSDYMMAWVRQAPGKGLEWVSSIVPSGGHTHYADSVKGRFTISRDNSKNTLYLQMNSLRAEDTAVYYCARVARGIAARSRTSYFDYWGQGTLVTVSSASTKGPSVFPLAPSSKS

SEQ ID NO: 2218 - protein, 109 aa, Artificial Sequence; identical to SEQ ID NO: 1138
  Description of Artificial Sequence: Synthetic polypeptide

SEQ ID NO: 2219 - protein, 142 aa, Artificial Sequence
  Description of Artificial Sequence: Synthetic polypeptide
EVQLLESGGGLVQPGGSLRLSCAASGFTFSHYLMTWVRQAPGKGLEWVSYISPSGGHTIYADSVKGRFTISRDNSKNTLYLQMNSLRAEDTAVYYCARVARGISARSRTSCFDYWGQGTLVTVSSASTKGPSVFPLAPSSKS

SEQ ID NO: 2220 - protein, 109 aa, Artificial Sequence; identical to SEQ ID NO: 1138
  Description of Artificial Sequence: Synthetic polypeptide

SEQ ID NO: 2221 - protein, 142 aa, Artificial Sequence
  Description of Artificial Sequence: Synthetic polypeptide
EVQLLESGGGLVQPGGSLRLSCAASGFTFSHYLMTWVRQAPGKGLEWVSYISPSGGHTIYADSVKGRFTISRDNSKNTLYLQMNSLRAEDTALYYCARVARGIAARSRTINLDYWGQGTLVTVSSASTKGPSVFPLAPSSKS

SEQ ID NO: 2222 - protein, 109 aa, Artificial Sequence; identical to SEQ ID NO: 1138
  Description of Artificial Sequence: Synthetic polypeptide

SEQ ID NO: 2223 - protein, 142 aa, Artificial Sequence
  Description of Artificial Sequence: Synthetic polypeptide
EVQLLESGGGLVQPGGSLRLSCAASGFTFSHYLMTWVRQAPGKGLEWVSYISPSGGHTIYADSVKGRFTISRDNSKNTLYLQMNSLRAEDTAVYYCARVARGIAARSRTRSFDYWGQGTLVTVSSASTKGPSVFPLAPSSKS

SEQ ID NO: 2224 - protein, 109 aa, Artificial Sequence; identical to SEQ ID NO: 1138
  Description of Artificial Sequence: Synthetic polypeptide

SEQ ID NO: 2225 - protein, 142 aa, Artificial Sequence
  Description of Artificial Sequence: Synthetic polypeptide
EVQLLESGGGLVQPGGSLRLSCAASGFTFSHYLMTWVRQAPGKGLEWVSYISPSGGHTIYADSVKGRFTISRDNSKNTLYLQMNSLRAEDTAVYYCARVGRGIAARSRTSYFDKWGQGTLVTVSSASTKGPSVFPLAPSSKS

SEQ ID NO: 2226 - protein, 109 aa, Artificial Sequence; identical to SEQ ID NO: 1138
  Description of Artificial Sequence: Synthetic polypeptide

SEQ ID NO: 2227 - protein, 142 aa, Artificial Sequence
  Description of Artificial Sequence: Synthetic polypeptide
EVQLLESGGGLVQPGGSLRLSCAASGFTFSHYLMTWVRQAPGKGLEWVSYISPSGGHTIYADSVKGRFTISRDNSKNTLYLQMNSLRAEDTAVYYCARVARGIAARSRTSQFDHWGQGTLVTVSSASTKGPSVFPLAPSSKS

SEQ ID NO: 2228 - protein, 109 aa, Artificial Sequence; identical to SEQ ID NO: 1138
  Description of Artificial Sequence: Synthetic polypeptide

SEQ ID NO: 2229 - protein, 142 aa, Artificial Sequence
  Description of Artificial Sequence: Synthetic polypeptide
EVQLLESGGGLVQPGGSLRLSCAASGFTFSHYLMTWVRQAPGKGLEWVSYISPSGGHTIYADSVKGRFTISRDNSKNTLYLQMNSLRAEDTAVYYCARVARGIAARSRTSFFDQWGQGTLVTVSSASTKGPSVFPLAPSSKS

SEQ ID NO: 2230 - protein, 109 aa, Artificial Sequence; identical to SEQ ID NO: 1138
  Description of Artificial Sequence: Synthetic polypeptide

SEQ ID NO: 2231 - protein, 142 aa, Artificial Sequence
  Description of Artificial Sequence: Synthetic polypeptide
EVQLLESGGGLVQPGGSLRLSCAASGFTFSHYLMTWVRQAPGKGLEWVSYISPSGGHTIYADSVKGRFTISRDNSKNTLYLQMNSLRAEDTAVYYCARVARGIAARSRTSFIDYWGQGTLVTVSSASTKGPSVFPLAPSSKS

SEQ ID NO: 2232 - protein, 109 aa, Artificial Sequence; identical to SEQ ID NO: 1138
  Description of Artificial Sequence: Synthetic polypeptide

SEQ ID NO: 2233 - protein, 142 aa, Artificial Sequence
  Description of Artificial Sequence: Synthetic polypeptide
EVQLLESGGGLVQPGGSLRLSCAASGFTFSHYLMTWVRQAPGKGLEWVSYISPSGGHTIYADSVKGRFTISRDNSKNTLYLQMNSLRAEDTAVYYCARLARGIAARSRTSYQDIWGQGTLVTVSSASTKGPSVFPLAPSSKS

SEQ ID NO: 2234 - protein, 109 aa, Artificial Sequence; identical to SEQ ID NO: 1138
  Description of Artificial Sequence: Synthetic polypeptide

SEQ ID NO: 2235 - protein, 142 aa, Artificial Sequence
  Description of Artificial Sequence: Synthetic polypeptide
EVQLLESGGGLVQPGGSLRLSCAASGFTFSHYLMTWVRQAPGKGLEWVSYISPSGGHTIYADSVKGRFTISRDNSKNTLYLQMNSLRAEDTAVYYCARVAQGISARSRTSYFDYWGQGTLVTVSSASTKGPSVFPLAPSSKS

SEQ ID NO: 2236 - protein, 109 aa, Artificial Sequence; identical to SEQ ID NO: 1138
  Description of Artificial Sequence: Synthetic polypeptide

SEQ ID NO: 2237 - protein, 142 aa, Artificial Sequence
  Description of Artificial Sequence: Synthetic polypeptide
EVQLLESGGGLVQPGGSLRLSCAASGFTFSHYLMTWVRQAPGKGLEWVSYISPSGGHTIYADSVKGRFTISRDNSKNTLYLQMNSLRAEDTAVYYCARVARGIAARSRTSFFDYWGQGTLVTVSSASTKGPSVFPLAPSSKS

SEQ ID NO: 2238 - protein, 109 aa, Artificial Sequence; identical to SEQ ID NO: 1138
  Description of Artificial Sequence: Synthetic polypeptide

SEQ ID NO: 2239 - protein, 142 aa, Artificial Sequence
  Description of Artificial Sequence: Synthetic polypeptide
EVQLLESGGGLVQPGGSLRLSCAASGFTFSHYLMTWVRQAPGKGLEWVSYISPSGGHTIYADSVKGRFTISRDNSKNTLYLQMNSLRAEDTAVYYCARVARGIAARSRTSYFDQWGQGTLVTVSSASTKGPSVFPLAPSSKS

SEQ ID NO: 2240 - protein, 109 aa, Artificial Sequence; identical to SEQ ID NO: 1138
  Description of Artificial Sequence: Synthetic polypeptide

SEQ ID NO: 2241 - protein, 142 aa, Artificial Sequence
  Description of Artificial Sequence: Synthetic polypeptide
EVQLLESGGGLVQPGGSLRLSCAASGFTFSHYLMTWVRQAPGKGLEWVSYISPSGGHTIYADSVKGRFTISRDNSKNTLYLQMNSLRAEDTAVYYCARVARGIADRSRTSYSDYWGQGTLVTVSSASTKGPSVFPLAPSSKS

SEQ ID NO: 2242 - protein, 109 aa, Artificial Sequence; identical to SEQ ID NO: 1138
  Description of Artificial Sequence: Synthetic polypeptide

SEQ ID NO: 2243 - protein, 142 aa, Artificial Sequence
  Description of Artificial Sequence: Synthetic polypeptide
EVQLLESGGGLVQPGGSLRLSCAASGFTFSHYLMTWVRQAPGKGLEWVSYISPSGGHTIYADSVKGRFTISRDNSKNTLYLQMNSLRAEDTAVYYCARVARGIAARSRTSYLDYWGQGTLVTVSSASTKGPSVFPLAPSSKS

SEQ ID NO: 2244 - protein, 109 aa, Artificial Sequence; identical to SEQ ID NO: 1138
  Description of Artificial Sequence: Synthetic polypeptide

SEQ ID NO: 2245 - protein, 142 aa, Artificial Sequence
  Description of Artificial Sequence: Synthetic polypeptide
EVQLLESGGGLVQPGGSLRLSCAASGFTFSHYLMTWVRQAPGKGLEWVSYISPSGGHTIYADSVKGRFTISRDNSKNTLYLQMNSLRAEDTAVYYCARVARGIASRSRTRYCDYWGQGTLVTVSSASTKGPSVFPLAPSSKS

SEQ ID NO: 2246 - protein, 109 aa, Artificial Sequence; identical to SEQ ID NO: 1138
  Description of Artificial Sequence: Synthetic polypeptide

SEQ ID NO: 2247 - protein, 142 aa, Artificial Sequence
  Description of Artificial Sequence: Synthetic polypeptide
EVQLLESGGGLVQPGGSLRLSCAASGFTFSHYLMTWVRQAPGKGLEWVSYISPSGGHTIYADSVKGRFTISRDNSKNTLYLQMNSLRAEDTAVYYCARVARGIVARSRTSNFDQWGQGTLVTVSSASTKGPSVFPLAPSSKS

SEQ ID NO: 2248 - protein, 109 aa, Artificial Sequence; identical to SEQ ID NO: 1138
  Description of Artificial Sequence: Synthetic polypeptide

SEQ ID NO: 2249 - protein, 142 aa, Artificial Sequence
  Description of Artificial Sequence: Synthetic polypeptide
EVQLLESGGGLVQPGGSLRLSCAASGFTFSHYLMTWVRQAPGKGLEWVSYISPSGGHTIYADSVKGRFTISRDNSKNTLYLQMNSLRAEDTAVYYCARVAQGIVARSRTSYLHQWGQGTLVTVSSASTKGPSVFPLAPSSKS

SEQ ID NO: 2250 - protein, 109 aa, Artificial Sequence; identical to SEQ ID NO: 1138
  Description of Artificial Sequence: Synthetic polypeptide

SEQ ID NO: 2251 - protein, 142 aa, Artificial Sequence
  Description of Artificial Sequence: Synthetic polypeptide
EVQLLESGGGLVQPGGSLRLSCAASGFTFSHYLMTWVRQAPGKGLEWVSYISPSGGHTIYADSVKGRFTISRDNSKNTLYLQMNSLRAEDTAVYYCARVARGIAARSRTRYIDQWGQGTLVTVSSASTKGPSVFPLAPSSKS

SEQ ID NO: 2252 - protein, 109 aa, Artificial Sequence; identical to SEQ ID NO: 1138
  Description of Artificial Sequence: Synthetic polypeptide

SEQ ID NO: 2253 - protein, 142 aa, Artificial Sequence
  Description of Artificial Sequence: Synthetic polypeptide
EVQLLESGGGLVQPGGSLRLSCAASGFTFSHYLMTWVRQAPGKGLEWVSYISPSGGHTIYADSVKGRFTISRDNSKNTLYLQMNSLRAEDTAVYYCARVARGIAYRRRTSYFDYWGQGTLVTVSSASTKGPSVFPLAPSSKS

SEQ ID NO: 2254 - protein, 109 aa, Artificial Sequence; identical to SEQ ID NO: 1138
  Description of Artificial Sequence: Synthetic polypeptide

SEQ ID NO: 2255 - protein, 142 aa, Artificial Sequence
  Description of Artificial Sequence: Synthetic polypeptide
EVQLLESGGGLVQPGGSLRLSCAASGFTFSHYLMTWVRQAPGKGLEWVSYISPSGGHTIYADSVKGRFTISRDNSKNTLYLQMNSLRAEDTAVYYCAMVGQGIRGRSRTSYFAQWGQGTLVTVSSASTKGPSVFPLAPSSKS

SEQ ID NO: 2256 - protein, 109 aa, Artificial Sequence; identical to SEQ ID NO: 1138
  Description of Artificial Sequence: Synthetic polypeptide

SEQ ID NO: 2257 - protein, 142 aa, Artificial Sequence
  Description of Artificial Sequence: Synthetic polypeptide
EVQLLESGGGLVQPGGSLRLSCAASGFTFSHYLMTWVRQAPGKGLEWVSYISPSGGHTIYADSVKGRFTISRDNSKNTLYLQMNSLRAEDTAVYYCARVGRGIAARSRTSQLDYWGQGTLVTVSSASTKGPSVFPLAPSSKS

SEQ ID NO: 2258 - protein, 109 aa, Artificial Sequence; identical to SEQ ID NO: 1138
  Description of Artificial Sequence: Synthetic polypeptide

SEQ ID NO: 2259 - protein, 142 aa, Artificial Sequence
  Description of Artificial Sequence: Synthetic polypeptide
EVQLLESGGGLVQPGGSLRLSCAASGFTFSHYLMTWVRQAPGKGLEWVSYISPSGGHTIYADSVKGRFTISRDNSKNTLYLQMNSLRAEDTAVYYCARVARGITARSRTSYFDDWGQGTLVTVSSASTKGPSVFPLAPSSKS

SEQ ID NO: 2260 - protein, 109 aa, Artificial Sequence; identical to SEQ ID NO: 1138
  Description of Artificial Sequence: Synthetic polypeptide

SEQ ID NO: 2261 - protein, 142 aa, Artificial Sequence
  Description of Artificial Sequence: Synthetic polypeptide
EVQLLESGGGLVQPGGSLRLSCAASGFTFSHYLMTWVRQAPGKGLEWVSYISPSGGHTIYADSVKGRFTISRDNSKNTLYLQMNSLRAEDTAVYYCARVGRGIAARSRTSFFDQWGQGTLVTVSSASTKGPSVFPLAPSSKS

SEQ ID NO: 2262 - protein, 109 aa, Artificial Sequence; identical to SEQ ID NO: 1138
  Description of Artificial Sequence: Synthetic polypeptide

SEQ ID NO: 2263 - protein, 142 aa, Artificial Sequence
  Description of Artificial Sequence: Synthetic polypeptide
EVQLLESGGGLVQPGGSLRLSCAASGFTFSHYLMTWVRQAPGKGLEWVSYISPSGGHTIYADSVKGRFTISRDNSKNTLYLQMNSLRAEDTAVYYCATVARGIAARSRTSYFDQWGQGTLVTVSSASTKGPSVFPLAPSSKS

SEQ ID NO: 2264 - protein, 109 aa, Artificial Sequence; identical to SEQ ID NO: 1138
  Description of Artificial Sequence: Synthetic polypeptide

SEQ ID NO: 2265 - protein, 142 aa, Artificial Sequence
  Description of Artificial Sequence: Synthetic polypeptide
EVQLLESGGGLVQPGGSLRLSCAASGFTFSHYLMTWVRQAPGKGLEWVSYISPSGGHTIYADSVKGRFTISRDNSKNTLYLQMNSLRAEDTAVYYCARVARGIAARSRTILLDQWGQGTLVTVSSASTKGPSVFPLAPSSKS

SEQ ID NO: 2266 - protein, 109 aa, Artificial Sequence; identical to SEQ ID NO: 1138
  Description of Artificial Sequence: Synthetic polypeptide

SEQ ID NO: 2267 - protein, 142 aa, Artificial Sequence
  Description of Artificial Sequence: Synthetic polypeptide
EVQLLESGGGLVQPGGSLRLSCAASGFTFSHYLMTWVRQAPGKGLEWVSYISPSGGHTIYADSVKGRFTISRDNSKNTLYLQMNSLRAEDTAVYYCARQARGIAARSRTSYFDYWGQGTLVTVSSASTKGPSVFPLAPSSKS

SEQ ID NO: 2268 - protein, 109 aa, Artificial Sequence; identical to SEQ ID NO: 1138
  Description of Artificial Sequence: Synthetic polypeptide

SEQ ID NO: 2269 - protein, 142 aa, Artificial Sequence
  Description of Artificial Sequence: Synthetic polypeptide
EVQLLESGGGLVQPGGSLRLSCAASGFTFSHYLMTWVRQAPGKGLEWVSYISPSGGHTIYADSVKGRFTISRDNSKNTLYLQMNSLRAEDTAVYYCARVARGIAARSRTSYLDQWSQGTLVTVSSASTKGPSVFPLAPSSKS

SEQ ID NO: 2270 - protein, 109 aa, Artificial Sequence; identical to SEQ ID NO: 1138
  Description of Artificial Sequence: Synthetic polypeptide

SEQ ID NO: 2271 - protein, 142 aa, Artificial Sequence
  Description of Artificial Sequence: Synthetic polypeptide
EVQLLESGGGLVQPGGSLRLSCAASGFTFSHYLMTWVRQAPGKGLEWVSYISPSGGHTIYADSVKGRFTISRDNSKNTLYLQMNSLRAEDTAVYYCARVAQGISGRSRLSYVDYWGQGTLVTVSSASTKGPSVFPLAPSSKS

SEQ ID NO: 2272 - protein, 109 aa, Artificial Sequence; identical to SEQ ID NO: 1138
  Description of Artificial Sequence: Synthetic polypeptide

SEQ ID NO: 2273 - protein, 142 aa, Artificial Sequence
  Description of Artificial Sequence: Synthetic polypeptide
EVQLLESGGGLVQPGGSLRLSCAASGFTFSHYLMTWVRQAPGKGLEWVSYISPSGGHTIYADSVKGRFTISRDNSKNTLYLQMNSLRAEDTAVYYCARVARGIAARSRTSYFDTWGQGTLVTVSSASTKGPSVFPLAPSSKS

SEQ ID NO: 2274 - protein, 109 aa, Artificial Sequence; identical to SEQ ID NO: 1138
  Description of Artificial Sequence: Synthetic polypeptide

SEQ ID NO: 2275 - protein, 142 aa, Artificial Sequence
  Description of Artificial Sequence: Synthetic polypeptide
EVQLLESGGGLVQPGGSLRLSCAASGFTFSHYLMTWVRQAPGKGLEWVSYISPSGGHTIYADSVKGRFTISRDNSKNTLYLQMNSLRAEDTAVYYCARVAQGIAARSRTTQFDYWGQGTLVTVSSASTKGPSVFPLAPSSKS

SEQ ID NO: 2276 - protein, 109 aa, Artificial Sequence; identical to SEQ ID NO: 1138
  Description of Artificial Sequence: Synthetic polypeptide

SEQ ID NO: 2277 - protein, 142 aa, Artificial Sequence
  Description of Artificial Sequence: Synthetic polypeptide
EVQLLESGGGLVQPGGSLRLSCAASGFTFSHYLMTWVRQAPGKGLEWVSYISPSGGHTIYADSVKGRFTISRDNSKNTLYLQMNSLRAEDTAVYYCARVARGIAARQRTSYYDYWGQGTLVTVSSASTKGPSVFPLAPSSKS

SEQ ID NO: 2278 - protein, 109 aa, Artificial Sequence; identical to SEQ ID NO: 1138
  Description of Artificial Sequence: Synthetic polypeptide

SEQ ID NO: 2279 - protein, 142 aa, Artificial Sequence
  Description of Artificial Sequence: Synthetic polypeptide
EVQLLESGGGLVQPGGSLRLSCAASGFTFSHYLMTWVRQAPGKGLEWVSYISPSGGHTIYADSVKGRFTISRDNSKNTLYLQMNSLRAEDTAVYYCARVARGIAARSRTVYFDHWGQGTLVTVSSASTKGPSVFPLAPSSKS

SEQ ID NO: 2280 - protein, 109 aa, Artificial Sequence; identical to SEQ ID NO: 1138
  Description of Artificial Sequence: Synthetic polypeptide

SEQ ID NO: 2281 - protein, 142 aa, Artificial Sequence
  Description of Artificial Sequence: Synthetic polypeptide
EVQLLESGGGLVQPGGSLRLSCAASGFTFSHYLMTWVRQAPGKGLEWVSYISPSGGHTIYADSVKGRFTISRDNSKNTLYLQMNSLRAEDTAVYYCARVARGIAARSRTSQFDYWGQGTLVTVSSASTKGPSVFPLAPSSKS

SEQ ID NO: 2282 - protein, 109 aa, Artificial Sequence; identical to SEQ ID NO: 1138
  Description of Artificial Sequence: Synthetic polypeptide

SEQ ID NO: 2283 - protein, 142 aa, Artificial Sequence
  Description of Artificial Sequence: Synthetic polypeptide
EVQLLESGGGLVQPGGSLRLSCAASGFTFSHYLMTWVRQAPGKGLEWVSYISPSGGHTIYADSVKGRFTISRDNSKNTLYLQMNSLRAEDTAVYYCASVARGIAARSRTSYFNQWGQGTLVTVSSASTKGPSVFPLAPSSKS

SEQ ID NO: 2284 - protein, 109 aa, Artificial Sequence; identical to SEQ ID NO: 1138
  Description of Artificial Sequence: Synthetic polypeptide

SEQ ID NO: 2285 - protein, 142 aa, Artificial Sequence
  Description of Artificial Sequence: Synthetic polypeptide
EVQLLESGGGLVQPGGSLRLSCAASGFTFSHYLMTWVRQAPGKGLEWVSYISPSGGHTIYADSVKGRFTISRDNSKNTLYLQMNSLRAEDTAVYYCARVAQGIAARSRTSSVDQWGQGTLVTVSSASTKGPSVFPLAPSSKS

SEQ ID NO: 2286 - protein, 109 aa, Artificial Sequence; identical to SEQ ID NO: 1138
  Description of Artificial Sequence: Synthetic polypeptide

SEQ ID NO: 2287 - protein, 142 aa, Artificial Sequence
  Description of Artificial Sequence: Synthetic polypeptide
EVQLLESGGGLVQPGGSLRLSCAASGFTFSHYLMTWVRQAPGKGLEWVSYISPSGGHTIYADSVKGRFTISRDNSKNTLYLQMNSLRAEDTAVYYCARVATGIVARSRTRYFDQWGQGTLVTVSSASTKGPSVFPLAPSSKS

SEQ ID NO: 2288 - protein, 109 aa, Artificial Sequence; identical to SEQ ID NO: 1138
  Description of Artificial Sequence: Synthetic polypeptide

SEQ ID NO: 2289 - protein, 142 aa, Artificial Sequence
  Description of Artificial Sequence: Synthetic polypeptide
EVQLLESGGGLVQPGGSLRLSCAASGFTFSHYLMTWVRQAPGKGLEWVSYISPSGGHTIYADSVKGRFTISRDNSKNTLYLQMNSLRAEDTAVYYCARVARGIAARSRTSYLDFWGQGTLVTVSSASTKGPSVFPLAPSSKS

SEQ ID NO: 2290 - protein, 109 aa, Artificial Sequence; identical to SEQ ID NO: 1138
  Description of Artificial Sequence: Synthetic polypeptide

SEQ ID NO: 2291 - protein, 142 aa, Artificial Sequence
  Description of Artificial Sequence: Synthetic polypeptide
EVQLLESGGGLVQPGGSLRLSCAASGFTFSHYLMTWVRQAPGKGLEWVSYISPSGGHTIYADSVKGRFTISRDNSKNTLYLQMNSLRAEDTAVYYCARVARGIAARSRNSQQDYWGQGTLVTVSSASTKGPSVFPLAPSSKS

SEQ ID NO: 2292 - protein, 109 aa, Artificial Sequence; identical to SEQ ID NO: 1138
  Description of Artificial Sequence: Synthetic polypeptide

SEQ ID NO: 2293 - protein, 142 aa, Artificial Sequence
  Description of Artificial Sequence: Synthetic polypeptide
EVQLLESGGGLVQPGGSLRLSCAASGFTFSHYLMTWVRQAPGKGLEWVSYISPSGGHTIYADSVKGRFTISRDNSKNTLYLQMNSLRAEDTAVYYCARVARGIAARSRTRYFDYWGQGTLVTVSSASTKGPSVFPLAPSSKS

SEQ ID NO: 2294 - protein, 109 aa, Artificial Sequence; identical to SEQ ID NO: 1138
  Description of Artificial Sequence: Synthetic polypeptide

SEQ ID NO: 2295 - protein, 142 aa, Artificial Sequence
  Description of Artificial Sequence: Synthetic polypeptide
EVQLLESGGGLVQPGGSLRLSCAASGFTFSHYLMTWVRQAPGKGLEWVSYISPSGGHTIYADSVKGRFTISRDNSKNTLYLQMNSLRAEDTAVYYCARVARGIAARSRTRYFDQWGQGTLVTVSSASTKGPSVFPLAPSSKS

SEQ ID NO: 2296 - protein, 60 aa, Artificial Sequence
  Description of Artificial Sequence: Synthetic polypeptide
EAMHSFCAFKADDGPCRAAHPRWFFNIFTRQCEEFSYGGCGGNQNRFESLEECKKMCTRD

SEQ ID NO: 2297 - protein, 12 aa, Artificial Sequence
  Description of Artificial Sequence: Synthetic peptide
RTSQFVNSNYLA

SEQ ID NO: 2298 - protein, 7 aa, Artificial Sequence
  Description of Artificial Sequence: Synthetic peptide
GASSRAT

SEQ ID NO: 2299 - protein, 9 aa, Artificial Sequence
  Description of Artificial Sequence: Synthetic peptide
QQSSRTPWT

SEQ ID NO: 2300 - protein, 5 aa, Artificial Sequence
  Description of Artificial Sequence: Synthetic peptide
HYLMT

SEQ ID NO: 2301 - protein, 17 aa, Artificial Sequence
  Description of Artificial Sequence: Synthetic peptide
YISPSGGHTIYADSVKG

SEQ ID NO: 2302 - protein, 16 aa, Artificial Sequence
  Description of Artificial Sequence: Synthetic peptide
VARGIAARSRTSYFDY

SEQ ID NO: 2303 - protein, 12 aa, Artificial Sequence
  Description of Artificial Sequence: Synthetic peptide
RTSQFVNSNYLA

SEQ ID NO: 2304 - protein, 7 aa, Artificial Sequence
  Description of Artificial Sequence: Synthetic peptide
GASSRAT

SEQ ID NO: 2305 - protein, 9 aa, Artificial Sequence
  Description of Artificial Sequence: Synthetic peptide
QQSSRTPWT

SEQ ID NO: 2306 - protein, 5 aa, Artificial Sequence
  Description of Artificial Sequence: Synthetic peptide
HYLMT

SEQ ID NO: 2307 - protein, 17 aa, Artificial Sequence
  Description of Artificial Sequence: Synthetic peptide
YISPSGGHTIYADSVKG

SEQ ID NO: 2308 - protein, 16 aa, Artificial Sequence
  Description of Artificial Sequence: Synthetic peptide
VGQGIRGRSRTSYFAQ

SEQ ID NO: 2309 - protein, 12 aa, Artificial Sequence
  Description of Artificial Sequence: Synthetic peptide
RTSQFVNSNYLA

SEQ ID NO: 2310 - protein, 7 aa, Artificial Sequence
  Description of Artificial Sequence: Synthetic peptide
GASSRAT

SEQ ID NO: 2311 - protein, 9 aa, Artificial Sequence
  Description of Artificial Sequence: Synthetic peptide
QQSSRTPWT

SEQ ID NO: 2312 - protein, 5 aa, Artificial Sequence
  Description of Artificial Sequence: Synthetic peptide
DYMMA

SEQ ID NO: 2313 - protein, 17 aa, Artificial Sequence
  Description of Artificial Sequence: Synthetic peptide
SIVPSGGHTHYADSVKG

SEQ ID NO: 2314 - protein, 16 aa, Artificial Sequence
  Description of Artificial Sequence: Synthetic peptide
VARGIAARSRTSYFDY

SEQ ID NO: 2315 - protein, 12 aa, Artificial Sequence
  Description of Artificial Sequence: Synthetic peptide
RTSQFVNSNYLA

SEQ ID NO: 2316 - protein, 7 aa, Artificial Sequence
  Description of Artificial Sequence: Synthetic peptide
GASSRAT

SEQ ID NO: 2317 - protein, 9 aa, Artificial Sequence
  Description of Artificial Sequence: Synthetic peptide
QQSSRTPWT

SEQ ID NO: 2318 - protein, 5 aa, Artificial Sequence
  Description of Artificial Sequence: Synthetic peptide
HYLMT

SEQ ID NO: 2319 - protein, 17 aa, Artificial Sequence
  Description of Artificial Sequence: Synthetic peptide
YISPSGGHTIYADSVKG

SEQ ID NO: 2320 - protein, 16 aa, Artificial Sequence
  Description of Artificial Sequence: Synthetic peptide
VAQGIAARSRTSSVDQ

SEQ ID NO: 2321 - protein, 12 aa, Artificial Sequence
  Description of Artificial Sequence: Synthetic peptide
RTSQFVNSNYLA

SEQ ID NO: 2322 - protein, 7 aa, Artificial Sequence
  Description of Artificial Sequence: Synthetic peptide
GASSRAT

SEQ ID NO: 2323 - protein, 9 aa, Artificial Sequence
  Description of Artificial Sequence: Synthetic peptide
QQSSRTPWT

SEQ ID NO: 2324 - protein, 5 aa, Artificial Sequence
  Description of Artificial Sequence: Synthetic peptide
HYLMT

SEQ ID NO: 2325 - protein, 17 aa, Artificial Sequence
  Description of Artificial Sequence: Synthetic peptide
YISPSGGHTIYADSVKG

SEQ ID NO: 2326 - protein, 16 aa, Artificial Sequence
  Description of Artificial Sequence: Synthetic peptide
VAQGISARSRTSYFDY

SEQ ID NO: 2327 - protein, 11 aa, Artificial Sequence
  Description of Artificial Sequence: Synthetic peptide
RASQSISSWLA

SEQ ID NO: 2328 - protein, 7 aa, Artificial Sequence
  Description of Artificial Sequence: Synthetic peptide
KASTLES

SEQ ID NO: 2329 - protein, 8 aa, Artificial Sequence
  Description of Artificial Sequence: Synthetic peptide
QQYNTYWT

SEQ ID NO: 2330 - protein, 5 aa, Artificial Sequence
  Description of Artificial Sequence: Synthetic peptide
HYIMM

SEQ ID NO: 2331 - protein, 17 aa, Artificial Sequence
  Description of Artificial Sequence: Synthetic peptide
GIYSSGGITVYADSVKG

SEQ ID NO: 2332 - protein, 13 aa, Artificial Sequence
  Description of Artificial Sequence: Synthetic peptide
RRTGIPRRDAFDI

SEQ ID NO: 2333 - protein, 11 aa, Artificial Sequence
  Description of Artificial Sequence: Synthetic peptide
RASQSISSWLA

SEQ ID NO: 2334 - protein, 7 aa, Artificial Sequence
  Description of Artificial Sequence: Synthetic peptide
KASTLES

SEQ ID NO: 2335 - protein, 8 aa, Artificial Sequence
  Description of Artificial Sequence: Synthetic peptide
QQYNTYWT

SEQ ID NO: 2336 - protein, 5 aa, Artificial Sequence
  Description of Artificial Sequence: Synthetic peptide
HYIMM

SEQ ID NO: 2337 - protein, 17 aa, Artificial Sequence
  Description of Artificial Sequence: Synthetic peptide
GIYSSGGITVYADSVKG

SEQ ID NO: 2338 - protein, 13 aa, Artificial Sequence
  Description of Artificial Sequence: Synthetic peptide
RRIGVPRRDSFDM

SEQ ID NO: 2339 - protein, 11 aa, Artificial Sequence
  Description of Artificial Sequence: Synthetic peptide
RASQSISSWLA

SEQ ID NO: 2340 - protein, 7 aa, Artificial Sequence
  Description of Artificial Sequence: Synthetic peptide
KASTLES

SEQ ID NO: 2341 - protein, 8 aa, Artificial Sequence
  Description of Artificial Sequence: Synthetic peptide
QQYNTYWT

SEQ ID NO: 2342 - protein, 5 aa, Artificial Sequence
  Description of Artificial Sequence: Synthetic peptide
IYSMH

SEQ ID NO: 2343 - protein, 17 aa, Artificial Sequence
  Description of Artificial Sequence: Synthetic peptide
SIYPSRGMTWYADSVKG

SEQ ID NO: 2344 - protein, 13 aa, Artificial Sequence
  Description of Artificial Sequence: Synthetic peptide
RRTGIPRRDAFDI

SEQ ID NO: 2345 - protein, 11 aa, Artificial Sequence
  Description of Artificial Sequence: Synthetic peptide
RASQSISSWLA

SEQ ID NO: 2346 - protein, 7 aa, Artificial Sequence
  Description of Artificial Sequence: Synthetic peptide
KASTLES

SEQ ID NO: 2347 - protein, 8 aa, Artificial Sequence
  Description of Artificial Sequence: Synthetic peptide
QQYNTYWT

SEQ ID NO: 2348 - protein, 5 aa, Artificial Sequence
  Description of Artificial Sequence: Synthetic peptide
HYIMM

SEQ ID NO: 2349 - protein, 17 aa, Artificial Sequence
  Description of Artificial Sequence: Synthetic peptide
GIYSSGGITVYADSVKG

SEQ ID NO: 2350 - protein, 13 aa, Artificial Sequence
  Description of Artificial Sequence: Synthetic peptide
RRIGVPRRDEFDI

SEQ ID NO: 2351 - protein, 11 aa, Artificial Sequence
  Description of Artificial Sequence: Synthetic peptide
RASQSISSWLA

SEQ ID NO: 2352 - protein, 7 aa, Artificial Sequence
  Description of Artificial Sequence: Synthetic peptide
KASTLES

SEQ ID NO: 2353 - protein, 8 aa, Artificial Sequence
  Description of Artificial Sequence: Synthetic peptide
QQYNTYWT

SEQ ID NO: 2354 - protein, 5 aa, Artificial Sequence
  Description of Artificial Sequence: Synthetic peptide
HYIMM

SEQ ID NO: 2355 - protein, 17 aa, Artificial Sequence
  Description of Artificial Sequence: Synthetic peptide
GIYSSGGITVYADSVKG

SEQ ID NO: 2356 - protein, 13 aa, Artificial Sequence
  Description of Artificial Sequence: Synthetic peptide
RRTGVPRRDEFDI

SEQ ID NO: 2357 - protein, 11 aa, Artificial Sequence
  Description of Artificial Sequence: Synthetic peptide
SGNKLGDKYVA

SEQ ID NO: 2358 - protein, 7 aa, Artificial Sequence
  Description of Artificial Sequence: Synthetic peptide
QDTKRPS

SEQ ID NO: 2359 - protein, 9 aa, Artificial Sequence
  Description of Artificial Sequence: Synthetic peptide
QAWDSSIVI

SEQ ID NO: 2360 - protein, 5 aa, Artificial Sequence
  Description of Artificial Sequence: Synthetic peptide
WYTMV

SEQ ID NO: 2361 - protein, 17 aa, Artificial Sequence
  Description of Artificial Sequence: Synthetic peptide
YIYPSGGATFYADSVKG

SEQ ID NO: 2362 - protein, 13 aa, Artificial Sequence
  Description of Artificial Sequence: Synthetic peptide
GSYDYIWGFYSDH

SEQ ID NO: 2363 - protein, 11 aa, Artificial Sequence
  Description of Artificial Sequence: Synthetic peptide
SGDKLGDKYTS

SEQ ID NO: 2364 - protein, 7 aa, Artificial Sequence
  Description of Artificial Sequence: Synthetic peptide
QDIKRPS

SEQ ID NO: 2365 - protein, 10 aa, Artificial Sequence
  Description of Artificial Sequence: Synthetic peptide
QAWDSPNARV

SEQ ID NO: 2366 - protein, 5 aa, Artificial Sequence
  Description of Artificial Sequence: Synthetic peptide
HYRMS

SEQ ID NO: 2367 - protein, 17 aa, Artificial Sequence
  Description of Artificial Sequence: Synthetic peptide
SIYPSGGRTVYADSVKG

SEQ ID NO: 2368 - protein, 19 aa, Artificial Sequence
  Description of Artificial Sequence: Synthetic peptide
DKFEWRLLFRGIGNDAFDI

SEQ ID NO: 2369 - protein, 11 aa, Artificial Sequence
  Description of Artificial Sequence: Synthetic peptide
RASQSIRNYLN

SEQ ID NO: 2370 - protein, 7 aa, Artificial Sequence
  Description of Artificial Sequence: Synthetic peptide
AASTLQS

SEQ ID NO: 2371 - protein, 9 aa, Artificial Sequence
  Description of Artificial Sequence: Synthetic peptide
QQLSGYPHT

SEQ ID NO: 2372 - protein, 5 aa, Artificial Sequence
  Description of Artificial Sequence: Synthetic peptide
FYYMV

SEQ ID NO: 2373 - protein, 17 aa, Artificial Sequence
  Description of Artificial Sequence: Synthetic peptide
VIYPSGGITVYADSVKG

SEQ ID NO: 2374 - protein, 16 aa, Artificial Sequence
  Description of Artificial Sequence: Synthetic peptide
DKWAVMPPYYYYAMDV

SEQ ID NO: 2375 - protein, 11 aa, Artificial Sequence
  Description of Artificial Sequence: Synthetic peptide
RASQSVSSYLA

SEQ ID NO: 2376 - protein, 7 aa, Artificial Sequence
  Description of Artificial Sequence: Synthetic peptide
DASNRAT

SEQ ID NO: 2377 - protein, 11 aa, Artificial Sequence
  Description of Artificial Sequence: Synthetic peptide
QQRSNWPRGFT

SEQ ID NO: 2378 - protein, 5 aa, Artificial Sequence
  Description of Artificial Sequence: Synthetic peptide
YYHMS

SEQ ID NO: 2379 - protein, 17 aa, Artificial Sequence
  Description of Artificial Sequence: Synthetic peptide
VISPSGGSTKYADSVKG

SEQ ID NO: 2380 - protein, 19 aa, Artificial Sequence
  Description of Artificial Sequence: Synthetic peptide
GGSSDYAWGSYRRPYYFDY

SEQ ID NO: 2381 - protein, 106 aa, Artificial Sequence; identical to SEQ ID NO: 242
  Description of Artificial Sequence: Synthetic polypeptide

SEQ ID NO: 2382 - protein, 107 aa, Artificial Sequence; identical to SEQ ID NO: 250
  Description of Artificial Sequence: Synthetic polypeptide

SEQ ID NO: 2383 - protein, 106 aa, Artificial Sequence
  Description of Artificial Sequence: Synthetic polypeptide
DIQMTQSPSTLSASVGDRVTITCRASQSISSWLAWYQQKPGKAPNLLIYKASTLESGVPSRFSGSGSGTEFTLTISSLQPDDFATYYCQQYNTYWTFGQGTKVEIK

SEQ ID NO: 2384 - protein, 108 aa, Artificial Sequence
  Description of Artificial Sequence: Synthetic polypeptide
EIVLTQSPGTLSLSPGERATLSCRTSQFVNSNYLAWYQQKPGQAPRLLIYGASSRATGIPDRFSGSGSGTDFTLTISRLEPEDFAVYYCQQSSRTPWTFGQGTKVEIK

SEQ ID NO: 2385 - protein, 106 aa, Artificial Sequence
  Description of Artificial Sequence: Synthetic polypeptide
DIQMTQSPSTLSASVGDRVTITCRASQSISSWLAWYQQKPGKAPKLLIYKASTLESGVPSRFSGSGSGTEFTLTISSLQPDDFATYYCQQYNTYWTFGQGTKVEIK

SEQ ID NO: 2386 - protein, 108 aa, Artificial Sequence; identical to SEQ ID NO: 2384
  Description of Artificial Sequence: Synthetic polypeptide

SEQ ID NO: 2387 - protein, 106 aa, Artificial Sequence; identical to SEQ ID NO: 2385
  Description of Artificial Sequence: Synthetic polypeptide

SEQ ID NO: 2388 - protein, 108 aa, Artificial Sequence; identical to SEQ ID NO: 2384
  Description of Artificial Sequence: Synthetic polypeptide

SEQ ID NO: 2389 - protein, 108 aa, Artificial Sequence; identical to SEQ ID NO: 2384
  Description of Artificial Sequence: Synthetic polypeptide

SEQ ID NO: 2390 - protein, 106 aa, Artificial Sequence; identical to SEQ ID NO: 2385
  Description of Artificial Sequence: Synthetic polypeptide

SEQ ID NO: 2391 - protein, 106 aa, Artificial Sequence; identical to SEQ ID NO: 2385
  Description of Artificial Sequence: Synthetic polypeptide

SEQ ID NO: 2392 - protein, 108 aa, Artificial Sequence; identical to SEQ ID NO: 2384
  Description of Artificial Sequence: Synthetic polypeptide

SEQ ID NO: 2393 - protein, 107 aa, Artificial Sequence
  Description of Artificial Sequence: Synthetic polypeptide
DIQMTQSPSSLSASVGDRVTITCRASQSIRNYLNWYQQKPGKAPNLLIYAASTLQSGVPARFSGSGSGTDFTLTISSLQPEDFATYYCQQLSGYPHTFGQGTKLEIK

SEQ ID NO: 2394 - protein, 110 aa, Artificial Sequence; identical to SEQ ID NO: 246
  Description of Artificial Sequence: Synthetic polypeptide

SEQ ID NO: 2395 - protein, 122 aa, Artificial Sequence
  Description of Artificial Sequence: Synthetic polypeptide
EVQLLESGGGLVQPGGSLRLSCAASGFTFSWYTMVWVRQAPGKGLEWVSYIYPSGGATFYADSVKGRFTISRDNSKNTLYLQMNSLRAEDTAVYYCAMGSYDYIWGFYSDHWGQGTLVTVSS

SEQ ID NO: 2396 - protein, 128 aa, Artificial Sequence
  Description of Artificial Sequence: Synthetic polypeptide
EVQLLESGGGLVQPGGSLRLSCAASGFTFSHYRMSWVRQAPGKGLEWVSSIYPSGGRTVYADSVKGRFTISRDNSKNTLYLQMNSLRAEDTAVYYCAKDKFEWRLLFRGIGNDAFDIWGQGTMVTVSS

SEQ ID NO: 2397 - protein, 122 aa, Artificial Sequence
  Description of Artificial Sequence: Synthetic polypeptide
EVQLLESGGGLVQPGGSLRLSCAASGFTFSHYIMMWVRQAPGKGLEWVSGIYSSGGITVYADSVKGRFTISRDNSKNTLYLQMNSLRAEDTAVYYCAYRRTGIPRRDAFDIWGQGTMVTVSS

SEQ ID NO: 2398 - protein, 125 aa, Artificial Sequence
  Description of Artificial Sequence: Synthetic polypeptide
EVQLLESGGGLVQPGGSLRLSCAASGFTFSHYLMTWVRQAPGKGLEWVSYISPSGGHTIYADSVKGRFTISRDNSKNTLYLQMNSLRAEDTAVYYCARVARGIAARSRTSYFDYWGQGTLVTVSS

SEQ ID NO: 2399 - protein, 122 aa, Artificial Sequence
  Description of Artificial Sequence: Synthetic polypeptide
EVQLLESGGGLVQPGGSLRLSCAASGFTFSHYIMMWVRQAPGKGLEWVSGIYSSGGITVYADSVKGRFTISRDNSKNTLYLQMNSLRAEDTAVYYCAWRRIGVPRRDSFDMWGQGTMVTVSS

SEQ ID NO: 2400 - protein, 125 aa, Artificial Sequence
  Description of Artificial Sequence: Synthetic polypeptide
EVQLLESGGGLVQPGGSLRLSCAASGFTFSHYLMTWVRQAPGKGLEWVSYISPSGGHTIYADSVKGRFTISRDNSKNTLYLQMNSLRAEDTAVYYCAMVGQGIRGRSRTSYFAQWGQGTLVTVSS

SEQ ID NO: 2401 - protein, 122 aa, Artificial Sequence
  Description of Artificial Sequence: Synthetic polypeptide
EVQLLESGGGLVQPGGSLRLSCAASGFTFSIYSMHWVRQAPGKGLEWVSSIYPSRGMTWYADSVKGRFTISRDNSKNTLYLQMNSLRAEDTAVYYCAYRRTGIPRRDAFDIWGQGTMVTVSS

SEQ ID NO: 2402 - protein, 125 aa, Artificial Sequence
  Description of Artificial Sequence: Synthetic polypeptide
EVQLLESGGGLVQPGGSLRLSCAASGFTFSDYMMAWVRQAPGKGLEWVSSIVPSGGHTHYADSVKGRFTISRDNSKNTLYLQMNSLRAEDTAVYYCARVARGIAARSRTSYFDYWGQGTLVTVSS

SEQ ID NO: 2403 - protein, 125 aa, Artificial Sequence
  Description of Artificial Sequence: Synthetic polypeptide
EVQLLESGGGLVQPGGSLRLSCAASGFTFSHYLMTWVRQAPGKGLEWVSYISPSGGHTIYADSVKGRFTISRDNSKNTLYLQMNSLRAEDTAVYYCARVAQGIAARSRTSSVDQWGQGTLVTVSS

SEQ ID NO: 2404 - protein, 122 aa, Artificial Sequence
  Description of Artificial Sequence: Synthetic polypeptide
EVQLLESGGGLVQPGGSLRLSCAASGFTFSHYIMMWVRQAPGKGLEWVSGIYSSGGITVYADSVKGRFTISRDNSKNTLYLQMNSLRAEDTAVYYCAYRRIGVPRRDEFDIWGQGTMVTVSS

SEQ ID NO: 2405 - protein, 122 aa, Artificial Sequence
  Description of Artificial Sequence: Synthetic polypeptide
EVQLLESGGGLVQPGGSLRLSCAASGFTFSHYIMMWVRQAPGKGLEWVSGIYSSGGITVYADSVKGRFTISRDNSKNTLYLQMNSLRAEDTAVYYCAYRRTGVPRRDEFDIWGQGTMVTVSS

SEQ ID NO: 2406 - protein, 125 aa, Artificial Sequence
  Description of Artificial Sequence: Synthetic polypeptide
EVQLLESGGGLVQPGGSLRLSCAASGFTFSHYLMTWVRQAPGKGLEWVSYISPSGGHTIYADSVKGRFTISRDNSKNTLYLQMNSLRAEDTAVYYCARVAQGISARSRTSYFDYWGQGTLVTVSS

SEQ ID NO: 2407 - protein, 125 aa, Artificial Sequence
  Description of Artificial Sequence: Synthetic polypeptide
EVQLLESGGGLVQPGGSLRLSCAASGFTFSFYYMVWVRQAPGKGLEWVSVIYPSGGITVYADSVKGRFTISRDNSKNTLYLQMNSLRAEDTAVYYCARDKWAVMPPYYYYAMDVWGQGTTVTVSS

SEQ ID NO: 2408 - protein, 128 aa, Artificial Sequence
  Description of Artificial Sequence: Synthetic polypeptide
EVQLLESGGGLVQPGGSLRLSCAASGFTFSYYHMSWVRQAPGKGLEWVSVISPSGGSTKYADSVKGRFTISRDNSKNTLYLQMNSLRAEDTAVYYCARGGSSDYAWGSYRRPYYFDYWGQGTLVTVSS

SEQ ID NO: 2409 - DNA, 318 bp, Artificial Sequence
  Description of Artificial Sequence: Synthetic polynucleotide
cagagcgctttgactcagccacccacagtgtctgtgtccccaggacagacagccaggatcacctgctctggaaataaattgggggataaatatgttgcctggtatcagcagaagccaggccagtcccctatgttggtcatctatcaagatactaagcgcccctcaagagtttctgagcgattctctggctccaactctgcgaatacagccactctgtccatcagcgggacccaggctctggatgaggctgactattactgtcaggcgtgggacagcagcattgtgatcttcggcggagggaccaggctgaccgtccta

SEQ ID NO: 2410 - DNA, 321 bp, Artificial Sequence
  Description of Artificial Sequence: Synthetic polynucleotide
cagagcgtcttgactcagccaccctcagtgtccgtgtctccaggacagacagccagcatcacctgctctggagataaattgggggataaatatacttcctggtatcagcagaggccaggccagtcccctgtattggtcatctatcaagatatcaagcggccctcagggatccctgagcgattctctggctccaactctgggaacacagccactctgaccatcagcgggacccaggctatggatgaggctgactattactgtcaggcgtgggacagtcccaatgcgagggtcttcggatctgggaccaaggtcaccgtccta

SEQ ID NO: 2411 - DNA, 318 bp, Artificial Sequence
  Description of Artificial Sequence: Synthetic polynucleotide
gacatccagatgacccagtctccttccaccctgtctgcatctgtaggagacagagtcaccatcacttgccgggccagtcagagtatcagtagttggttggcctggtatcagcagaaaccagggaaagcccctaacctcctgatctataaggcgtctactttagaaagtggggtcccatcaaggttcagcggcagtggatctgggacagaattcactctcaccatcagcagcctgcagcctgatgattttgcaacttattactgccaacagtataatacttattggacgttcggccaagggaccaaggtggaaatcaaa

SEQ ID NO: 2412 - DNA, 324 bp, Artificial Sequence
  Description of Artificial Sequence: Synthetic polynucleotide
gagatcgtgctgacccagtcccctggcaccctgtctctgtctcccggcgagagagccaccctgtcctgccggacctcccagttcgtgaactccaactacctggcttggtatcagcagaagccaggccaggcccctagactgctgatctacggcgcctcttccagagccaccggcatccctgaccggttctccggctctggctccggcaccgacttcaccctgaccatctcccggctggaacctgaggacttcgccgtgtactactgccagcagtcctcccggaccccttggacctttggccagggcaccaaggtggagatcaag

SEQ ID NO: 2413 - DNA, 318 bp, Artificial Sequence
  Description of Artificial Sequence: Synthetic polynucleotide
gacatccagatgacccagtccccctccaccctgtccgcctctgtgggcgacagagtgaccatcacctgtcgggcctcccagtccatctccagctggctggcctggtatcagcagaagcccggcaaggcccccaagctgctgatctacaaggccagcaccctggaatccggcgtgccctccagattctccggctctggctccggcaccgagttcaccctgaccatcagctccctgcagcccgacgacttcgccacctactactgccagcagtacaacacctactggaccttcggccagggcaccaaggtggaaatcaag

SEQ ID NO: 2414 - DNA, 324 bp, Artificial Sequence; identical to SEQ ID NO: 2412
  Description of Artificial Sequence: Synthetic polynucleotide

SEQ ID NO: 2415 - DNA, 318 bp, Artificial Sequence; identical to SEQ ID NO: 2413
  Description of Artificial Sequence: Synthetic polynucleotide

SEQ ID NO: 2416 - DNA, 324 bp, Artificial Sequence; identical to SEQ ID NO: 2412
  Description of Artificial Sequence: Synthetic polynucleotide

SEQ ID NO: 2417 - DNA, 324 bp, Artificial Sequence; identical to SEQ ID NO: 2412
  Description of Artificial Sequence: Synthetic polynucleotide

SEQ ID NO: 2418 - DNA, 318 bp, Artificial Sequence; identical to SEQ ID NO: 2413
  Description of Artificial Sequence: Synthetic polynucleotide

SEQ ID NO: 2419 - DNA, 318 bp, Artificial Sequence; identical to SEQ ID NO: 2413
  Description of Artificial Sequence: Synthetic polynucleotide

SEQ ID NO: 2420 - DNA, 324 bp, Artificial Sequence; identical to SEQ ID NO: 2412
  Description of Artificial Sequence: Synthetic polynucleotide

SEQ ID NO: 2421 - DNA, 321 bp, Artificial Sequence
  Description of Artificial Sequence: Synthetic polynucleotide
gacatccagatgacccagtctccatcctccctgtctgcatctgtaggagacagagtcaccatcacttgccgggcaagtcagagtattcgcaactatttaaattggtatcagcagaaaccagggaaagcccctaacctcctgatctatgctgcatccactttgcaaagtggggtcccagcaaggttcagtggcagtggatctgggacagatttcactctcactatcagcagtctgcagcctgaagattttgcaacttattactgtcaacagcttagtggttacccccacacttttggccaggggaccaagctggagatcaaa

SEQ ID NO: 2422 - DNA, 330 bp, Artificial Sequence
  Description of Artificial Sequence: Synthetic polynucleotide
caagacatccagatgacccagtctccagccaccctgtctttgtctccaggggaaagagccaccctctcctgcagggccagtcagagtgttagcagctacttagcctggtaccaacagaaacctggccaggctcccaggctcctcatctatgatgcatccaacagggccactggcatcccagccaggttcagtggcagtgggtctgggacagacttcactctcaccatcagcagcctagagcctgaagattttgcagtttattactgtcagcagcgtagcaactggcctcgcggattcactttcggccctgggaccaaagtggatatcaaa

SEQ ID NO: 2423 - DNA, 366 bp, Artificial Sequence
  Description of Artificial Sequence: Synthetic polynucleotide
gaagttcaattgttagagtctggtggcggtcttgttcagcctggtggttctttacgtctttcttgcgctgcttccggattcactttctcttggtacactatggtttgggttcgccaagctcctggtaaaggtttggagtgggtttcttatatctatccttctggtggcgctactttttatgctgactccgttaaaggtcgcttcactatctctagagacaactctaagaatactctctacttgcagatgaacagcttaagggctgaggacacggccgtgtattactgtgcgatgggttcatatgattacatttggggattttatagtgaccactggggccagggaaccctggtcaccgtctcaagc

SEQ ID NO: 2424 - DNA, 384 bp, Artificial Sequence
  Description of Artificial Sequence: Synthetic polynucleotide
gaagttcaattgttagagtctggtggcggtcttgttcagcctggtggttctttacgtctttcttgcgctgcttccggattcactttctctcattaccgtatgtcttgggttcgccaagctcctggtaaaggtttggagtgggtttcttctatctatccttctggtggccgtactgtttatgctgactccgttaaaggtcgcttcactatctctagagacaactctaagaatactctctacttgcagatgaacagcttaagggctgaggacacggccgtgtattactgtgcgaaagataagttcgagtggaggttattatttcgcgggattggaaatgatgcttttgatatctggggccaagggacaatggtcaccgtctcaagc

SEQ ID NO: 2425 - DNA, 366 bp, Artificial Sequence
  Description of Artificial Sequence: Synthetic polynucleotide
gaagttcaattgttagagtctggtggcggtcttgttcagcctggtggttctttacgtctttcttgcgctgcttccggattcactttctctcattacattatgatgtgggttcgccaagctcctggtaaaggtttggagtgggtttctggtatctattcttctggtggcattactgtttatgctgactccgttaaaggtcgcttcactatctctagagacaactctaagaatactctctacttgcagatgaacagcttaagggctgaggacacggccgtgtattactgtgcgtaccgccggactgggattccaagaagagatgcttttgatatctggggccaagggacaatggtcaccgtctcaagc

SEQ ID NO: 2426 - DNA, 375 bp, Artificial Sequence
  Description of Artificial Sequence: Synthetic polynucleotide
gaggtgcaattgctggaatccggcggaggtctggtgcagcctggcggctccctgagactgtcttgcgccgcctccggcttcaccttctcccactacctgatgacctgggtgcgccaggctcctggcaagggcctcgaatgggtgtcctacatctccccctctggcggccacaccatctacgccgactccgtgaagggccggttcaccatctcccgggacaactccaagaacaccctgtatctgcagatgaactccctgagggccgaggacaccgccgtgtactactgcgccagggtggccagaggaatcgccgccaggtcccggacctcctacttcgactactggggccagggcaccctggtgaccgtgtcctcc

SEQ ID NO: 2427 - DNA, 366 bp, Artificial Sequence
  Description of Artificial Sequence: Synthetic polynucleotide
gaggtgcaattgctggaatccggcggaggactggtgcagcctggcggctccctgagactgtcttgcgccgcctccggctttaccttctcccactacatcatgatgtgggtgcgacaggctccaggcaagggcctggaatgggtgtccggcatctactcctccggcggcatcaccgtgtacgccgactccgtgaagggccggttcaccatctcccgggacaactccaagaacaccctgtacctgcagatgaactccctgcgggccgaggacaccgccgtgtactactgtgcctggcggagaatcggcgtgcccagacgggactccttcgacatgtggggacagggcaccatggtgacagtgtcctcc

SEQ ID NO: 2428 - DNA, 375 bp, Artificial Sequence
  Description of Artificial Sequence: Synthetic polynucleotide
gaggtgcaattgctggaatccggcggaggactggtgcagcctggcggctccctgagactgtcttgcgccgcctccggcttcaccttctcccactacctgatgacctgggtgcgacaggctcctggcaaaggcctggaatgggtgtcctacatctccccctctggcggccacaccatctacgccgactccgtgaagggccggtttaccatctcccgggacaactccaagaacaccctgtacctgcagatgaactccctgcgggccgaggacaccgccgtgtactactgtgccatggtcggccagggaatccggggcagatcccggacctcctacttcgcccagtggggccagggcaccctggtgacagtgtcctct

SEQ ID NO: 2429 - DNA, 366 bp, Artificial Sequence
  Description of Artificial Sequence: Synthetic polynucleotide
gaggtgcaattgctggaatccggcggaggactggtgcagcctggcggctccctgagactgtcttgcgccgcctccggcttcaccttctccatctactccatgcactgggtgcgacaggctccaggcaagggcctggaatgggtgtcctccatctacccctcccggggcatgacttggtacgccgactccgtgaagggccggttcacaatctcccgggacaactccaagaacaccctgtacctgcagatgaactccctgcgggccgaggacaccgccgtgtactactgcgcctaccggcggaccggcatccctagacgggacgccttcgacatctgggggcagggcaccatggtgacagtgtcctcc

SEQ ID NO: 2430 - DNA, 375 bp, Artificial Sequence
  Description of Artificial Sequence: Synthetic polynucleotide
gaggtgcaattgctggaatccggcggtggactggtgcagcctggcggctccctgagactgtcttgcgccgcctccggcttcaccttctccgactacatgatggcctgggtgcgacaggcccctggcaagggactggaatgggtgtcctccatcgtgccctctggcggccacacccactacgccgactccgtgaagggccggttcaccatctcccgggacaactccaagaacaccctgtacctgcagatgaactccctgcgggccgaggacaccgccgtgtactactgcgccagagtggccagaggaatcgccgccagatcccggacctcctacttcgactactggggccagggcaccctggtgacagtgtcctcc

SEQ ID NO: 2431 - DNA, 375 bp, Artificial Sequence
  Description of Artificial Sequence: Synthetic polynucleotide
gaggtgcaattgctggaatccggcggaggactggtgcagcctggcggctccctgagactgtcttgcgccgcctccggcttcaccttctcccactacctgatgacctgggtgcgacaggctcctggcaaaggcctggaatgggtgtcctacatctccccctctggcggccacaccatctacgccgactccgtgaagggccggtttaccatctcccgggacaactccaagaacaccctgtacctgcagatgaactccctgcgggccgaggacaccgccgtgtactactgtgcccgggtggcccagggaatcgccgccagatcccggacctcctctgtggatcagtggggccagggcaccctggtgacagtgtcctct

SEQ ID NO: 2432 - DNA, 366 bp, Artificial Sequence
  Description of Artificial Sequence: Synthetic polynucleotide
gaggtgcaattgctggaatccggcggaggactggtgcagcctggcggctccctgagactgtcttgcgccgcctccggcttcaccttctcccactacatcatgatgtgggtgcgacaggctcctggcaaggggctggaatgggtgtccggcatctactcctccggcggcatcaccgtgtacgccgactccgtgaagggccggttcaccatctctcgggacaactccaagaacaccctgtacctgcagatgaactccctgcgggccgaggacaccgccgtgtactactgcgcctaccggcggatcggcgtgcccagacgggacgagttcgacatctgggggcagggcaccatggtgacagtgtcctcc

SEQ ID NO: 2433 - DNA, 366 bp, Artificial Sequence
  Description of Artificial Sequence: Synthetic polynucleotide
gaggtgcaattgctggaatccggcggaggactggtgcagcctggcggctccctgagactgtcttgcgccgcctccggcttcaccttctctcactacattatgatgtgggtgcgacaggctcctggcaaaggcctggaatgggtgtccggcatctactcctccggcggcatcaccgtgtacgccgactccgtgaagggccggttcaccatctcccgggacaactccaagaacaccctgtacctgcagatgaactccctgcgggccgaggacaccgccgtgtactactgcgcctacagacggaccggcgtgcccagacgggacgagttcgatatctgggggcagggcaccatggtgacagtgtcctcc

SEQ ID NO: 2434 - DNA, 375 bp, Artificial Sequence
  Description of Artificial Sequence: Synthetic polynucleotide
gaggtgcaattgctggaatccggcggaggactggtgcagcctggcggctccctgagactgtcttgcgccgcctccggcttcaccttctcccactacctgatgacctgggtgcgacaggctcctggcaaaggcctggaatgggtgtcctacatctccccctctggcggccacaccatctacgccgactccgtgaagggccggtttaccatctcccgggacaactccaagaacaccctgtacctgcagatgaactccctgcgggccgaggacaccgccgtgtactactgtgcccgggtggcccagggaatctccgccagatcccggacctcctacttcgattactggggccagggcaccctggtgacagtgtcctct

SEQ ID NO: 2435 - DNA, 375 bp, Artificial Sequence
  Description of Artificial Sequence: Synthetic polynucleotide
gaagttcaattgttagagtctggtggcggtcttgttcagcctggtggttctttacgtctttcttgcgctgcttccggattcactttctctttttactatatggtttgggttcgccaagctcctggtaaaggtttggagtgggtttctgttatctatccttctggtggcattactgtttatgctgactccgttaaaggtcgcttcactatctctagagacaactctaagaatactctctacttgcagatgaacagcttaagggctgaggacacggccgtgtattactgtgcgagagataaatgggcggtgatgcccccctactactactacgctatggacgtctggggccaagggaccacggtcaccgtctcaagc

SEQ ID NO: 2436 - DNA, 384 bp, Artificial Sequence
  Description of Artificial Sequence: Synthetic polynucleotide
gaagttcaattgttagagtctggtggcggtcttgttcagcctggtggttctttacgtctttcttgcgctgcttccggattcactttctcttattaccatatgtcttgggttcgccaagctcctggtaaaggtttggagtgggtttctgttatctctccttctggtggctctactaagtatgctgactccgttaaaggtcgcttcactatctctagagacaactctaagaatactctctacttgcagatgaacagcttaagggctgaggacactgcagtctactattgtgcgagaggcggttcgagcgattacgcttgggggagttatcgtcgaccctactactttgactactggggccagggaaccctggtcaccgtctcaagc

SEQ ID NO: 2437 - DNA, 327 bp, Artificial Sequence
  Description of Artificial Sequence: Synthetic polynucleotide
caagacatccagatgacccagtctccaggcaccctgtctttgtctccaggggaaagagccaccctctcctgcaggaccagtcaatttgttaacagcaactacttagcctggtaccaacagacacctggccaggctcccaggctcctcatctatggtgcatccagcagggccactggcatcccagacaggttcagtggcactgggtatgggacagacttcactctcaccatcagcagactggagcctgaagattatggaacttactactgtcagcagagttccagaaccccgtggacgttcggccaagggaccagagtggaaatcaaa

SEQ ID NO: 2438 - DNA, 324 bp, Artificial Sequence; identical to SEQ ID NO: 2412
  Description of Artificial Sequence: Synthetic polynucleotide

SEQ ID NO: 2439 - protein, 109 aa, Artificial Sequence; identical to SEQ ID NO: 1138
  Description of Artificial Sequence: Synthetic polypeptide

SEQ ID NO: 2440 - protein, 108 aa, Artificial Sequence; identical to SEQ ID NO: 2384
  Description of Artificial Sequence: Synthetic polypeptide

SEQ ID NO: 2441 - DNA, 375 bp, Artificial Sequence; identical to SEQ ID NO: 2426
  Description of Artificial Sequence: Synthetic polynucleotide

SEQ ID NO: 2442 - DNA, 375 bp, Artificial Sequence
  Description of Artificial Sequence: Synthetic polynucleotide
gaagttcaattgttagagtctggtggcggtcttgttcagcctggtggttctttacgtctttcttgcgctgcttccggattcactttctctcattaccttatgacttgggttcgccaagctcctggtaaaggtttggagtgggtttcttatatctctccttctggtggccatactatttatgctgactccgttaaaggtcgcttcactatctctagagacaactctaagaatactctctacttgcagatgaacagcttaagggctgaggacacggccgtgtattactgtgcgagagtggcccgggggatagcagctcgatcgcgaaccagctactttgactactggggccagggaaccctggtcaccgtctcaagc

SEQ ID NO: 2443 - protein, 125 aa, Artificial Sequence; identical to SEQ ID NO: 2398
  Description of Artificial Sequence: Synthetic polypeptide

SEQ ID NO: 2444 - protein, 125 aa, Artificial Sequence; identical to SEQ ID NO: 2398
  Description of Artificial Sequence: Synthetic polypeptide

SEQ ID NO: 2445 - protein, 19 aa, Artificial Sequence
  Description of Artificial Sequence: Synthetic peptide
LVTNEECQKRYQDYKITQQ

SEQ ID NO: 2446 - protein, 5 aa, Artificial Sequence
  Description of Artificial Sequence: Synthetic peptide
SWGDI

SEQ ID NO: 2447 - protein, 8 aa, Artificial Sequence
  Description of Artificial Sequence: Synthetic peptide
HDIALIKL

SEQ ID NO: 2448 - protein, 14 aa, Artificial Sequence
  Description of Artificial Sequence: Synthetic peptide
WVTGWGFSKEKGEI

SEQ ID NO: 2449 - protein, 15 aa, Artificial Sequence
  Description of Artificial Sequence: Synthetic peptide
TPFSQIKEIIIHQNY

SEQ ID NO: 2450 - protein, 10 aa, Artificial Sequence
  Description of Artificial Sequence: Synthetic peptide
ACKGDSGGPL

SEQ ID NO: 2451 - protein, 16 aa, Artificial Sequence
  Description of Artificial Sequence: Synthetic peptide
AHCFDGLPLQDVWRIY

SEQ ID NO: 2452 - protein, 638 aa, Homo sapiens [sequence omitted]

SEQ ID NO: 2453 - protein, 636 aa, Bos taurus
MIALRQAAYFICLFATVSCGCLTQLYHNIFFRGGDVSAMYTPDAQYCQLMCTFHPRCLLFSFLPENSTSDADKRFGCFLKDSVTGTLPRVSRTGAISGHSLKRCGHQISACHRSIYKGIDMRGVNFNASKVRSAKECQERCTNNIHCQFFTYATKTFFSAEYRNTCLLKRSPQGTPTRIKVLSDVESGFSLKACGNSKIGCRVDIFQHSAFSDVDVAGIIAPDAFVCRTICTYHPSCLFFTFYTNAWKTDSQRNVCFLKTSQSGSPSSPTPQENAISGYSLLTCKQTLPGTEPCHSKIYPQVAFEGEELHVTFVKGVDGCQETCTKMIRCQFFTYSLFPEDCRGEKCKCSLRLSLDGSPTNITYGTQASSGYSLRLCKRGDSRVCTTKRTRIVGGTNASWGEWPWQVSLQVKQRAQSHLCGGSIIGRQWVLTAAHCFDGLLLSNIWRIYGGILNLSEITTETSFSQIKEIIVHPNYKISEGSHDIALIKLEAPLNFTDLQKAICLPSKDDTKPVYTDCWITGWGFTEEKGKIQNTLQKANIPLISNEECQKSYRDYKITKQMICAGYKEGGKDACKGDSGGPLVCQHEETWHLVGITSWGEGCARREQPGVYTKVAEYVDWILEKTQDSHGQPLRK

SEQ ID NO: 2454 - protein, 638 aa, Mus musculus; identical to SEQ ID NO: 4

SEQ ID NO: 2455 - protein, 638 aa, Rattus norvegicus
MILFKQVGYFVSLFATVSCGCLSQLYANTFFRGGDLAAIYTPDAQHCQKMCTFHPRCLLFSFLAVSPTKETDKRFGCFMKESITGTLPRIHRTGAISGHSLKQCGHQLSACHQDIYEGLDMRGSNFNISKTDSIEECQKLCTNNIHCQFFTYATKAFHRPEYRKSCLLKRSSSGTPTSIKPVDNLVSGFSLKSCALSEIGCPMDIFQHFAFADLNVSQVVTPDAFVCRTVCTFHPNCLFFTFYTNEWETESQRNVCFLKTSKSGRPSPPIIQENAVSGYSLFTCRKARPEPCHFKIYSGVAFEGEELNATFVQGADACQETCTKTIRCQFFTYSLLPQDCKAEGCKCSLRLSTDGSPTRITYEAQGSSGYSLRLCKVVESSDCTTKINARIVGGTNSSLGEWPWQVSLQVKLVSQNHMCGGSIIGRQWILTAAHCFDGIPYPDVWRIYGGILNLSEITNKTPFSSIKELIIHQKYKMSEGSYDIALIKLQTPLNYTEFQKPICLPSKADTNTIYTNCWVTGWGYTKERGETQNILQKATIPLVPNEECQKKYRDYVITKQMICAGYKEGGIDACKGDSGGPLVCKHSGRWQLVGITSWGEGCARKEQPGVYTKVAEYIDWILEKIQSSKERALETSPA

SEQ ID NO: 2456 - protein, 643 aa, Sus scrofa
MEVIVLFRIISFRQAVYFMCLFAAVSCGCLPQLHKNTFFRGGDVSAMYTPSARHCQMMCTFHPRCLLFSFLPADSTSVTDKRFGCFLKDSVTGMLPRVLRENAISGHSLKQCGHQIRACHRDIYKGIDMRGVNFNVSKVKTVEECQERCTNSIHCLFFTYATQAFNNAEYRNNCLLKHSPGGTPTSIKVLANVESGFSLKPCADSEIGCHMDIFQHLAFSDVDVARVIAPDAFVCRTICTYHPNCLFFTFYTNAWKIESQRNVCFLKTSHSGTPSFPTPQENAISGYSLLTCKQTLPEPCHSKIYSEVDFEGEELNVTFVQGANLCQETCTKTIRCQFFTYSLHPEDCRGEKCKCSLRLSSDGSPTKITHGMRASSGYSLRLCRSGDHSACATKANTRIVGGTDSFLGEWPWQVSLQAKLRAQNHLCGGSIIGHQWVLTAAHCFDGLSLPDIWRIYGGILNISEITKETPFSQVKEIIIHQNYKILESGHDIALLKLETPLNYTDFQKPICLPSRDDTNVVYTNCWVTGWGFTEEKGEIQNILQKVNIPLVSNEECQKSYRDHKISKQMICAGYKEGGKDACKGESGGPLVCKYNGIWHLVGTTSWGEGCARREQPGVYTKVIEYMDWILEKTQDDDGQSWMK

SEQ ID NO: 2457 - protein, 629 aa, Xenopus laevis
MACYYSSLLFLLLFTLVSGGCISELYQDIYWQGGDLRSVFAPDVEYCQLVCTFSPRCLMFSYLPASWPKENERFACYLKESATNMLPKVTLTGVISGHSLKNCKSKINVCRDKNFPGIDMIGTNYNVTSTANVQQCKEGCTNDIYCQYFTYVTQEFHSAQLRNRCYFKYSGKGMPTRIRLLDNVISGFSLKACGKSSLGCQNDLFQNMELPGETLTRVFAPDVLTCQKICTFYPNCLFFTFFKKDSKDPLQRNVCYVRTSTKGIPDEVINKEHTISGFSLLSCKFSPSVCPLTMLSDSEFLGDELLVEEVSGEKECQQACTNNIRCQFFTYGPVKSGCLEKKCKCHMKISSNGLPTGIRHGNGGISGFSLRLCKMKSVKGCGEPSEHANRIVGGTDSVLGEWPWQVSMHLRLGASYKKHACGGSIISNQWIVTAAHCVALYPQPQMWIIYSGFVRILNITKSTPFSELEKIIIHPHYTGAGNGSDIALLKLKTPIVFNDHQKAICLPPSEATLVLPNSCWITGWGYTEETGSPGNVLQKAEVPPISTEECQGSYVETRIDKKVLCAGYKSGKIDACKGDSGGPLVCEVDEIWYLTGITSWGEGCARPGKPGVYTRVSTFTNWILEHTKL

SEQ ID NO: 2458 - protein, 641 aa, Macaca mulatta
MILFKQATYFISLFATVSCGCLTQLYENAFFRGGDVASMYTPNAQHCQMMCTFHPRCLLFSFLPASSINDMEKRFGCFLKDSVTGTLPKVRRAGAISGHSLKQCGHQISACHRDIYKGIDMRGVNFNVSKVSSVEECQKRCTNNIRCQFFSYATQTFHNAEYRNTCLLKHSPGGTPTTIKVLNNVESGFSLKPCALSEIGCHMNIFQHLAFSDVDVARVLAPDAFVCRTICTYHPSCLFFTFYTNAWKIESQRRVCMLAGSQDGAAHSSLGDARLRLKQKNKNKQTKKNTLPEPCHSKIYPGVDFGGEELNVTFVKGVNVCQETCTKMIRCQFFTYSLLPEDCKEEKCKCFLRLSSDGSPTRITYGTQGSSGYSLRLCNTGDSSVCTTKTSSRIVGGTNSSWGEWPWQVSLQVKLMAQRHLCGGSLIGHQWVLTAAHCFDGLPLPDVWRIYSGILNLSDITKETPFSQIKEIIIHQNYRISEGNHDIALIKLQAPLNYTEFQKPICLPSKGDTNTIYTNCWVTGWGFSKEKGEIQDILQKVNIPLVTNEECQKRYQDYKITQRMVCAGYKEGGKDACKGDSGGPLACKHNGMWRLVGITSWGEGCARREQPGVYTKVAEYMDWILEKTQSSDGNARMQAPA

SEQ ID NO: 2459 - protein, 629 aa, Canis familiaris
MLIKLPLKWVSQGCLTQLYKNTFFKGGDLTAMYTPNAHHCQMMCTFHPRCLLFSFLPESSTNDVNKRFGCFLKDSVTETLPRMSWTSAISGHSLKQCGHQISACHRDIHKGIDMRGVNFNVSKVKSVEECQKKCTNSIHCQFFTYATETFYNVEYRNSCLLKNGPGGTPSSIKVLADVVSGFSLKSCALSEIGCHMNIFQHLAFSDVDVARVVTPDAFVCQTICTYHPNCLFFTFYTKAWHLEPQRNVCFLKTSKSGTPSSPTSQKNAMSGYSLLTCKKALPEPCHSKIYSGVDFEGEELNVTFAEGVNACQETCTKMIRCQFFTYSLRPEDCRGEKCKCSLRLSLDGSPTGMTYGTRVSSGYSLRLCKSGDSSVCTTKTSTRIVGGTNSSWGEWPWQVSLQVKLRAQSHLCGGSIIGRQWVLTAAHCFDELSLPDVWRIYSGILNLSEITKETPFSQIKEIIIHQNYKITDGGSYDIALIKLEAPLNYTEFQKPICLPSKDDTNTTYTNCWVTGWGFTKERGEIQNSLQKANIPLVPNEECQKKYRDYEVNKQMICAGYKEGGKDACKGDSGGPLVCKHNGNWHLVGITSWGEGCGRREQPGVYTKVAEYVDWILEKTQVGDGHAGLG
